(19) United States
(12) Patent Application Publication
(10) Pub. No.: US 2020/0362058 A1
(43) Pub. Date: Nov. 19, 2020

(54) ANTIBODY-CYTOKINE ENGRAFTED PROTEINS AND METHODS OF USE

(71) Applicant: NOVARTIS AG, Basel (CH)

(72) Inventors: Michael DiDonato, San Diego, CA (US); Glen Spraggon, San Diego, CA (US)

(21) Appl. No.: 16/616,131

(22) PCT Filed: May 22, 2018
(86) PCT No.: PCT/IB2018/053625

§ 371 Date: Nov. 22, 2019

Related U.S. Application Data
(60) Provisional application No. 62/510,573, filed on May 24, 2017.

(51) Int. Cl. C07K 16/46; C07K 14/52; A61P 35/00

(52) U.S. Cl. CPC C07K 16/46; A61K 45/06; A61P 35/00; C07K 14/52

(57) ABSTRACT

The present invention provides antibody cytokine engrafted (ACE) proteins, including those that stimulate intracellular signaling, and are useful in the treatment of cancer, immunotherapy and metabolic disorders. In particular, the provided ACE protein compositions provide preferred biological effects over wild type cytokine proteins. For example, the provided ACE proteins can convey improved half-life, stability and produceability over the corresponding recombinant cytokine formulations.

### CROSS-REFERENCE TO RELATED APPLICATIONS

[0001] This application claims the benefit of U.S. Provisional Application No. 62/510,573 filed May 24, 2017, the content of which is hereby incorporated by reference in its entirety.

### FIELD

[0002] The present invention relates to Antibody Cytokine Engrafted (ACE) proteins, compositions and methods of treatment.

### SEQUENCE LISTING

[0003] The instant application contains a Sequence Listing which has been submitted electronically in ASCII format and is hereby incorporated by reference in its entirety. Said ASCII copy, created on May 14, 2018, is named PAT057624-WO-PCT_SL.txt and is 4,389,055 bytes in size.

### BACKGROUND

[0004] Helical cytokines are compact molecules made up of four to seven alpha helices, with a total helical content of 70-90%. A signature element of all helical cytokines is a four-helix bundle, the amphipathic helices of which are arranged in an almost antiparallel manner so that the majority of the hydrophobic amino acids are involved in the formation of an internal hydrophobic core inside the helical bundle.

[0005] Four alpha helix bundles display some common characteristics. The first to examine the four helix bundle proteins was Weber and Salemme (Weber and Salemme, Nature 1980; 287:82-84). In this work, the four-helix bundles considered were antiparallel helices arranged in an up-down-up-down topology. Using a larger data set, this type of protein topology was further defined in the work by Presnell, including the topology of helical cytokines with helices arranged in an up-up-down-down conformation (Presnell and Cohen, PNAS USA 1989; 86:6592-6596).

[0006] Several four helix bundle proteins, including IL-6, leukemia inhibitory factor (LIF), oncostatin M (OSM), ciliary neurotrophic factor (CNTF), cardiotrophin-1 (CT-1), cardiotrophin-like cytokine (CLC), IL-11 and IL-31, belong to a family of cytokines wherein signaling is mediated via the receptor subunit GP130 (Barton et al., J. Biol. Chem 1999; 274:5755-5761). Therefore, these cytokines partly show functional overlaps, despite some unique biological activities (Negandaripour et al., Cytokine and Growth Factor Rev. 2016; 32:41-61). In addition to GP130, several other receptor subunits may be involved in the signaling transduction of this family

### DESCRIPTION

[0007] The present disclosure provides for a cytokine engrafted into a CDR sequence of an antibody, and henceforth, these Antibody Cytokine Engrafted proteins will be known as ACE proteins. In particular, the provided ACE protein compositions provide preferred biological effects over wild type cytokine proteins. For example, the provided ACE proteins can convey improved half-life, stability and produceability over the corresponding recombinant cytokine formulations. The disclosure provides for an ACE protein comprising: (a) a heavy chain variable region (VH), comprising Complementarity Determining Regions (CDR) HCDR1, HCDR2, HCDR3; and (b) a light chain variable region (VL), comprising LCDR1, LCDR2, LCDR3; and (c) a cytokine molecule engrafted into a CDR of the VH or the VL. In some embodiments, the cytokine molecule is directly engrafted into the CDR. In some embodiments, the cytokine molecule is not interleukin-10 (IL-10).

[0008] In some embodiments, the cytokine molecule is engrafted into a heavy chain CDR.

[0009] In some embodiments, the heavy chain CDR is selected from complementarity determining region 1 (HCDR1), complementarity determining region 2 (HCDR2) or complementarity determining region 3 (HCDR3).

[0010] In some embodiments, the cytokine molecule is engrafted into the HCDR1.

[0011] In some embodiments, the cytokine molecule is engrafted into the HCDR2.

[0012] In some embodiments, the cytokine molecule is engrafted into the HCDR3.

[0013] In some embodiments, the cytokine molecule is engrafted into a light chain CDR.

[0014] In some embodiments, the light chain CDR is selected from complementarity determining region 1 (LCDR1), complementarity determining region 2 (LCDR2) or complementarity determining region 3 (LCDR3).

[0015] In some embodiments, the cytokine molecule is engrafted into the LCDR1.

[0016] In some embodiments, the cytokine molecule is engrafted into the LCDR2.

[0017] In some embodiments, the cytokine molecule is engrafted into the LCDR3.

[0018] In some embodiments, the cytokine molecule is directly engrafted into the CDR without a peptide linker.

[0019] In some embodiments, the cytoline molecule is a molecule selected from Table 1.

[0020] In some embodiments, the ACE protein further comprises an IgG class antibody heavy chain.

[0021] In some embodiments, the IgG class heavy chain is selected from IgG1, IgG2, or IgG4.

[0022] In some embodiments, the binding specificity of the CDRs to the target protein is reduced by the engrafted cytokine molecule.

[0023] In some embodiments, the binding wherein the binding specificity of the CDRs to the target protein is reduced by 10%, 20%, 30%, 40%, 50%, 60%, 70%, 80%, 90%, 95%, 98%, 99%, or 100%, by the engrafted cytokine molecule.

[0024] In some embodiments, the binding specificity of the CDRs to the target protein is retained in the presence of the engrafted cytokine molecule.

[0025] In some embodiments, the binding specificity of the CDRs to the target protein is retained by 10%, 20%, 30%, 40%, 50%, 60%, 70%, 80%, 90%, 95%, 98%, 99%, or 100%, in the presence of the engrafted cytokine molecule.

[0026] In some embodiments, the binding specificity of the CDRs is distinct from the binding specificity of the cytokine molecule.

[0027] In some embodiments, the binding specificity of the CDRs is to a non-human antigen.

[0028] In some embodiments, the non-human antigen is a virus.

[0029] In some embodiments, the virus is respiratory syncytial virus (RSV).

[0030] In some embodiments, the RSV is selected from RSV subgroup A or RSV subgroup B.

[0031] In some embodiments, the antibody scaffold of the ACE protein is humanized or human

[0032] In some embodiments, the antibody scaffold of the ACE protein is palivizumab.

[0033] In some embodiments, the binding affinity of the engrafted cytokine molecule to a receptor is increased in comparison to a free cytokine molecule.

[0034] In some embodiments, the binding affinity of the engrafted cytokine molecule to a receptor is decreased in comparison to a free cytokine molecule.

[0035] In some embodiments, the binding avidity of the engrafted cytokine molecule to a receptor is increased in comparison to a free cytokine molecule.

[0036] In some embodiments, the binding avidity of the engrafted cytokine molecule to a receptor is decreased in comparison to a free cytokine molecule.

[0037] In some embodiments, the the differential binding affinity or avidity of the engrafted cytokine molecule to two or more receptors is changed in comparison to a free cytokine molecule.

[0038] In some embodiments, an activity of the engrafted cytokine molecule is increased in comparison to a free cytokine molecule.

[0039] In some embodiments, an activity of the engrafted cytokine molecule is decreased in comparison to a free cytokine molecule.

[0040] Some embodiments disclosed herein provide ACE proteins comprising: a heavy chain variable region that comprises: (a) a HCDR1, (b) a HCDR2, and (c) a HCDR3, wherein each of the HCDR sequences are set forth in TABLE 2, and a light chain variable region that comprises: (d) a LCDR1, (e) a LCDR2, and (f) a LCDR3, wherein each of the LCDR sequences are set forth in TABLE 2, wherein a cytokine molecule is engrafted into a CDR.

[0041] Some embodiments disclosed herein provide ACE proteins with the proviso that ACE proteins comprising an IL10 cytokine are excluded.

[0042] Some embodiments disclosed herein provide ACE proteins with the proviso that ACE proteins set forth in TABLE 3 are excluded.

[0043] Some embodiments disclosed herein provide ACE proteins comprising: a heavy chain variable region (VH) that comprises a VH set forth in TABLE 2, and a light chain variable region (VL) that comprises a VL set forth in TABLE 2, wherein a cytokine molecule is engrafted into a VH or VL.

[0044] In some embodiments, the ACE protein further comprises a modified Fc region corresponding with reduced effector function.

[0045] In some embodiments, the modified Fc region comprises a mutation selected from one or more of D265A, P329A, P329G, N297A, L234A, and L235A.

[0046] In some embodiments, the modified Fc region comprises a combination of mutations selected from one or more of D265A/P329A, D265A/N297A, L234/L235A, P329A/L234A/L235A, and P329G/L234A/L235A.

[0047] In some embodiments, the Fc region mutation is D265A/P329A.

[0048] Some embodiments disclosed herein provide isolated nucleic acids encoding an ACE protein comprising: a heavy chain variable region as set forth in TABLE 2 and/or a light chain variable region as set forth in TABLE 2, wherein a cytokine molecule is engrafted into the heavy chain variable region or the light chain variable region.

[0049] Some embodiments disclosed herein provide recombinant host cells suitable for the production of an ACE protein comprising the nucleic acids disclosed herein, and optionally, a secretion signal.

[0050] In some embodiments, the recombinant host cell is a mammalian cell line.

[0051] In some embodiments, the mammalian cell line is a CHO cell line.

[0052] Some embodiments disclosed herein provide pharmaceutical compositions comprising the ACE proteins disclosed herein and a pharmaceutically acceptable carrier.

[0053] Some embodiments disclosed herein provide methods of treating a disease in an individual in need thereof, comprising administering to the individual a therapeutically effective amount of the pharmaceutical compositions disclosed herein.

[0054] In some embodiments, the disease is a cancer.

[0055] In some embodiments, the cancer is selected from the group consisting of: melanoma, lung cancer, colorectal cancer, prostate cancer, breast cancer and lymphoma.

[0056] In some embodiments, the pharmaceutical composition is administered in combination with another therapeutic agent.

[0057] In some embodiments, the therapeutic agent is an immune checkpoint inhibitor.

[0058] In some embodiments, the antagonist to the immune checkpoint is selected from the group consisting of: PD-1, PD-L1, PD-L2, TIM3, CTLA-4, LAG-3, CEACAM-1, CEACAM-5, VISTA, BTLA, TIGIT, LAIR1, CD160, 2B4 and TGFR.

[0059] In some embodiments, the immune checkpoint inhibitor is an anti-PD-L1 antibody.

[0060] In some embodiments, the immune checkpoint inhibitor is an anti-TIM3 antibody.

[0061] In some embodiments, the disease is an immune related disorder.

[0062] In some embodiments, the immune related disorder is selected from the group consisting of: inflammatory bowel disease, Crohn's disease, ulcerative colitis, rheumatoid arthritis, psoriasis, type I diabetes, acute pancreatitis, uveitis, Sjogren's disease, Behcet's disease, sarcoidosis, graft versus host disease (GVHD), System Lupus Erythematosus, Vitiligo, chronic prophylactic acute graft versus host disease (pGvHD), HIV-induced vasculitis, Alopecia areata, Systemic sclerosis morphoea, and primary anti-phospholipid syndrome.

[0063] In some embodiments, the pharmaceutical composition is administered in combination with another therapeutic agent.

[0064] In some embodiments, the therapeutic agent is an anti-TNF agent selected from the group consisting of: infliximab, adalimumab, certolizumab, golimumab, natalizumab, and vedolizumab.

[0065] In some embodiments, the therapeutic agent is an aminosalicylate agent selected from the group consisting of: sulfasalazine, mesalamine, balsalazide, olsalazine and other derivatives of 5-aminosalicylic acid.

[0066] In some embodiments, the therapeutic agent is a corticosteroid selected from the group consisting of: methylprednisolone, hydrocortisone, prednisone, budenisonide, mesalamine, and dexamethasone.

[0067] In some embodiments, the therapeutic agent is an antibacterial agent.

[0068] Some embodiments disclosed herein provide uses of an ACE protein comprising: a heavy chain variable region that comprises (a) a HCDR1 (b) a HCDR2 (c) a HCDR3 wherein each of the HCDR sequences are set forth in TABLE 2, and a light chain variable region that comprises: (d) a LCDR1, (e) a LCDR2, and (f) a LCDR3, wherein each of the LCDR sequences are set forth in TABLE 2, in the treatment of of a disease, wherein a cytokine molecule is engrafted into a CDR.

[0069] In some embodiments, the disease is a cancer.

[0070] In some embodiments, the cancer is selected from the group consisting of: melanoma, lung cancer, colorectal cancer, prostate cancer, breast cancer and lymphoma.

[0071] In some embodiments, the pharmaceutical composition is administered in combination with another therapeutic agent.

[0072] In some embodiments, the therapeutic agent is an immune checkpoint inhibitor.

[0073] In some embodiments, the antagonist to the immune checkpoint is selected from the group consisting of: PD-1, PD-L1, PD-L2, TIM3, CTLA-4, LAG-3, CEACAM-1, CEACAM-5, VISTA, BTLA, TIGIT, LAIR1, CD160, 2B4 and TGFR.

[0074] In some embodiments, the immune checkpoint inhibitor is an anti-PD-L1 antibody.

[0075] In some embodiments, the immune checkpoint inhibitor is an anti-TIM3 antibody.

[0076] In some embodiments, the disease is an immune related disorder.

[0077] In some embodiments, the immune related disorder is selected from the group consisting of: inflammatory bowel disease, Crohn's disease, ulcerative colitis, rheumatoid arthritis, psoriasis, type I diabetes, acute pancreatitis, uveitis, Sjogren's disease, Behcet's disease, sarcoidosis, graft versus host disease (GVHD), System Lupus Erythematosus, Vitiligo, chronic prophylactic acute graft versus host disease (pGvHD), HIV-induced vasculitis, Alopecia areata, Systemic sclerosis morphoea, and primary anti-phospholipid syndrome.

[0078] In some embodiments, the pharmaceutical composition is administered in combination with another therapeutic agent.

[0079] In some embodiments, the therapeutic agent is an anti-TNF agent selected from the group consisting of: infliximab, adalimumab, certolizumab, golimumab, natalizumab, and vedolizumab.

[0080] In some embodiments, the therapeutic agent is an aminosalicylate agent selected from the group consisting of: sulfasalazine, mesalamine, balsalazide, olsalazine and other derivatives of 5-aminosalicylic acid.

[0081] In some embodiments, the therapeutic agent is a corticosteroid selected from the group consisting of: methylprednisolone, hydrocortisone, prednisone, budenisonide, mesalamine, and dexamethasone.

[0082] In some embodiments, the therapeutic agent is an antibacterial agent.

[0083] In certain embodiments, the ACE protein comprises an IgG class antibody Fc region. In particular embodiments, the antibody Fc region is selected from IgG1, IgG2, or IgG4 subclass Fc region. In some embodiments, the antibody optionally contains at least one modification that modulates (i.e., increases or decreases) binding of the antibody to an Fc receptor. The antibody Fc region may optionally comprise a modification conferring modified effector function. In particular embodiments the antibody Fc region may comprise a mutation conferring reduced effector function selected from any of D265A, P329A, P329G, N297A, D265A/P329A, D265A/N297A, L234/L235A, P329A/L234A/L235A, and P329G/L234A/L235A. In some embodiments, the Fc mutation is D265A/P329A.

[0084] In some embodiments, the ACE protein also comprises a wild type cytokine or a variant thereof. The variations can be single amino acid changes, single amino acid deletions, multiple amino acid changes and multiple amino acid deletions. For example, a variation in the cytokine portion of the molecule can decrease or increase the affinity of the ACE protein for the cytokine receptor.

[0085] In some embodiments, an IL10 wild type or variant cytokine is excluded. In other embodiments, the IL10 ACE proteins as disclosed in TABLE 3 are excluded. In some embodiments, the IL10 ACE protein from Example 39, Example 40, Example 41, Example 42, Example 43, Example 44, Example 45, Example 46, Example 47, Example 48, Example 49, Example 50, or Example 41 are excluded.

[0086] Furthermore, the disclosure provides polynucleotides encoding at least a heavy chain and/or a light chain protein of an ACE protein as described herein. In another related aspect, host cells are provided that are suitable for the production of an ACE protein as described herein. In particular embodiments, host cells comprise nucleic acids encoding an ACE protein as described herein. In still another aspect, methods for producing ACE proteins are provided, comprising culturing provided host cells as described herein under conditions suitable for expression, formation, and secretion of the ACE protein and recovering the ACE protein from the culture. In a further aspect, the disclosure further provides kits comprising an ACE protein, as described herein.

[0087] In another related aspect, the disclosure further provides compositions comprising an ACE protein, as described herein, and a pharmaceutically acceptable carrier. In some embodiments, the disclosure provides pharmaceutical compositions comprising an ACE protein for administering to an individual.

### Definitions

[0088] An “antibody” refers to a molecule of the immunoglobulin family comprising a tetrameric structural unit. Each tetramer is composed of two identical pairs of polypeptide chains, each pair having one “light” chain (about 25 kD) and one “heavy” chain (about 50-70 kD), connected through a disulfide bond. Recognized immunoglobulin genes include the κ, λ, α, γ, δ, ε, and μ constant region genes, as well as the myriad immunoglobulin variable region genes. Light chains are classified as either κ or Heavy chains are classified as γ, μ, α, δ, or ε, which in turn define the immunoglobulin classes, IgG, IgM, IgA, IgD, and IgE, respectively. Antibodies can be of any isotype/class (e.g., IgG, IgM, IgA, IgD, and IgE), or any subclass (e.g., IgG1, IgG2, IgG3, IgG4, IgA1, IgA2).

[0089] Both the light and heavy chains are divided into regions of structural and functional homology. The terms “constant” and “variable” are used structurally and functionally. The N-terminus of each chain defines a variable (V) region or domain of about 100 to 110 or more amino acids primarily responsible for antigen recognition. The terms variable light chain (V_{L}) and variable heavy chain (V_{H}) refer to these regions of light and heavy chains respectively. The pairing of a VH and VL together forms a single antigen-binding site. In addition to V regions, both heavy chains and light chains contain a constant (C) region or domain A secreted form of a immunoglobulin C region is made up of three C domains, CH1, CH2, CH3, optionally CH4 (CO, and a hinge region. A membrane-bound form of an immunoglobulin C region also has membrane and intracellular domains. Each light chain has a V_{L} at the N-terminus followed by a constant domain (C) at its other end. The constant domains of the light chain (CL) and the heavy chain (CH1, CH2 or CH3) confer important biological properties such as secretion, transplacental mobility, Fc receptor binding, complement binding, and the like. By convention, the numbering of the constant region domains increases as they become more distal from the antigen binding site or amino-terminus of the antibody. The N-terminus is a variable region and at the C-terminus is a constant region; the CH3 and CL domains actually comprise the carboxy-terminal domains of the heavy and light chain, respectively. The VL is aligned with the VH and the CL is aligned with the first constant domain of the heavy chain. As used herein, an “antibody” encompasses conventional antibody structures and variations of antibodies. Thus, within the scope of this concept are ACE proteins, full length antibodies, chimeric antibodies, humanized antibodies, human antibodies, and antibody fragments thereof.

[0090] Antibodies exist as intact immunoglobulin chains or as a number of well-characterized antibody fragments produced by digestion with various peptidases. The term “antibody fragment,” as used herein, refers to one or more portions of an antibody that retains six CDRs. Thus, for example, pepsin digests an antibody below the disulfide linkages in the hinge region to produce F(ab)′₂, a dimer of Fab′ which itself is a light chain joined to V_{H}-C_{H}1 by a disulfide bond. The F(ab)′₂ may be reduced under mild conditions to break the disulfide linkage in the hinge region, thereby converting the F(ab)′₂ dimer into an Fab′ monomer. The Fab′ monomer is essentially a Fab with a portion of the hinge region (Paul, Fundamental Immunology 3d ed. (1993)). While various antibody fragments are defined in terms of the digestion of an intact antibody, one of skill will appreciate that such fragments may be synthesized de novo either chemically or by using recombinant DNA methodology. As used herein, an “antibody fragment” refers to one or more portions of an antibody, either produced by the modification of whole antibodies, or those synthesized de novo using recombinant DNA methodologies, that retain binding specificity and functional activity. Examples of antibody fragments include Fv fragments, single chain antibodies (ScFv), Fab, Fab′, Fd (Vh and CH1 domains), dAb (Vh and an isolated CDR); and multimeric versions of these fragments (e.g., F(ab′)₂,) with the same binding specificity. ACE proteins can also comprise antibody fragments necessary to achieve the desired binding specificity and activity.

[0091] A “Fab” domain as used in the context comprises a heavy chain variable domain, a constant region CH1 domain, a light chain variable domain, and a light chain constant region CL domain. The interaction of the domains is stabilized by a disulfide bond between the CH1 and CL domains. In some embodiments, the heavy chain domains of the Fab are in the order, from N-terminus to C-terminus, VH-CH and the light chain domains of a Fab are in the order, from N-terminus to C-terminus, VL-CL. In some embodiments, the heavy chain domains of the Fab are in the order, from N-terminus to C-terminus, CH-VH and the light chain domains of the Fab are in the order CL-VL. Although the Fab fragment was historically identified by papain digestion of an intact immunoglobulin, in the context of this disclosure, a “Fab” is typically produced recombinantly by any method. Each Fab fragment is monovalent with respect to antigen binding, i.e., it has a single antigen-binding site.

[0092] “Complementarity-determining domains” or “complementary-determining regions” (“CDRs”) interchangeably refer to the hypervariable regions of VL and VH. CDRs are the target protein-binding site of antibody chains that harbors specificity for such target protein. There are three CDRs (CDR1-3, numbered sequentially from the N-terminus) in each human V_{L} or V_{H}, constituting about 15-20% of the variable domains CDRs are structurally complementary to the epitope of the target protein and are thus directly responsible for the binding specificity. The remaining stretches of the V_{L} or V_{H}, the so-called framework regions (FR), exhibit less variation in amino acid sequence (Kuby, Immunology, 4th ed., Chapter 4. W.H. Freeman & Co., New York, 2000).

[0093] Positions of CDRs and framework regions can be determined using various well known definitions in the art, e.g., Kabat, Chothia, and AbM (see, e.g., Kabat et al. 1991 Sequences of Proteins of Immunological Interest, Fifth Edition, U.S. Department of Health and Human Services, NIH Publication No. 91-3242, Johnson et al., Nucleic Acids Res., 29:205-206 (2001); Chothia and Lesk, J. Mol. Biol., 196:901-917 (1987); Chothia et al., Nature, 342:877-883 (1989); Chothia et al., J. Mol. Biol., 227:799-817 (1992); Al-Lazikani et al., J. Mol. Biol., 273:927-748 (1997)). Definitions of antigen combining sites are also described in the following: Ruiz et al., Nucleic Acids Res., 28:219-221 (2000); and Lefranc, M. P., Nucleic Acids Res., 29:207-209 (2001); (ImMunoGenTics (IMGT) numbering) Lefranc, M.-P., The Immunologist, 7, 132-136 (1999); Lefranc, M.-P. et al., Dev. Comp. Immunol., 27, 55-77 (2003); MacCallum et al., J. Mol. Biol., 262:732-745 (1996); and Martin et al., Proc. Natl. Acad. Sci. USA, 86:9268-9272 (1989); Martin et al., Methods Enzymol., 203:121-153 (1991); and Rees et al., In Sternberg M. J. E. (ed.), Protein Structure Prediction, Oxford University Press, Oxford, 141-172 (1996).

[0094] Under Kabat, CDR amino acid residues in the V_{H} are numbered 31-35 (HCDR1), 50-65 (HCDR2), and 95-102 (HCDR3); and the CDR amino acid residues in the V_{L} are numbered 24-34 (LCDR1), 50-56 (LCDR2), and 89-97 (LCDR3). Under Chothia, CDR amino acids in the V_{H} are numbered 26-32 (HCDR1), 52-56 (HCDR2), and 95-102 (HCDR3); and the amino acid residues in V_{L} are numbered 26-32 (LCDR1), 50-52 (LCDR2), and 91-96 (LCDR3). By combining the CDR definitions of both Kabat and Chothia, the CDRs consist of amino acid residues 26-35 (HCDR1), 50-65 (HCDR2), and 95-102 (HCDR3) in human VH and amino acid residues 24-34 (LCDR1), 50-56 (LCDR2), and 89-97 (LCDR3) in human VL.

[0095] An “antibody variable light chain” or an “antibody variable heavy chain” as used herein refers to a polypeptide comprising the V_{L} or V_{H}, respectively. The endogenous V_{L} is encoded by the gene segments V (variable) and J (junctional), and the endogenous V_{H} by V, D (diversity), and J. Each of V_{L} or V_{H} includes the CDRs as well as the framework regions (FR). The term “variable region” or “V-region” interchangeably refer to a heavy or light chain comprising FR1-CDR1-FR2-CDR2-FR3-CDR3-FR4. A V-region can be naturally occurring, recombinant or synthetic. In this application, antibody light chains and/or antibody heavy chains may, from time to time, be collectively referred to as “antibody chains.” As provided and further described herein, an “antibody variable light chain” or an “antibody variable heavy chain” and/or a “variable region” and/or an “antibody chain” optionally comprises a cytokine polypeptide sequence incorporated into a CDR.

[0096] The C-terminal portion of an immunoglobulin heavy chain herein, comprising, e.g., CH2 and CH3 domains, is the “Fc” domain. An “Fc region” as used herein refers to the constant region of an antibody excluding the first constant region (CH1) immunoglobulin domain. Fc refers to the last two constant region immunoglobulin domains of IgA, IgD, and IgG, and the last three constant region immunoglobulin domains of IgE and IgM, and the flexible hinge N-terminal to these domains. For IgA and IgM Fc may include the J chain. For IgG, Fc comprises immunoglobulin domains Cγ2 and Cγ3 and the hinge between Cγ1 and Cγ. It is understood in the art that boundaries of the Fc region may vary, however, the human IgG heavy chain Fc region is usually defined to comprise residues C226 or P230 to its carboxyl-terminus, using the numbering is according to the EU index as in Kabat et al. (1991, NIH Publication 91-3242, National Technical Information Service, Springfield, Va.). “Fc region” may refer to this region in isolation or this region in the context of an antibody or antibody fragment. “Fc region” includes naturally occurring allelic variants of the Fc region, e.g., in the CH2 and CH3 region, including, e.g., modifications that modulate effector function. Fc regions also include variants that don't result in alterations to biological function. For example, one or more amino acids are deleted from the N-terminus or C-terminus of the Fc region of an immunoglobulin without substantial loss of biological function. For example, in certain embodiments a C-terminal lysine is modified replaced or removed. In particular embodiments one or more C-terminal residues in the Fc region is altered or removed. In certain embodiments one or more C-terminal residues in the Fc (e.g., a terminal lysine) is deleted. In certain other embodiments one or more C-terminal residues in the Fc is substituted with an alternate amino acid (e.g., a terminal lysine is replaced). Such variants are selected according to general rules known in the art so as to have minimal effect on activity (see, e.g., Bowie, et al., Science 247:306-1310, 1990). The Fc domain is the portion of the immunoglobulin (Ig) recognized by cell receptors, such as the FcR, and to which the complement-activating protein, C1 q, binds. The lower hinge region, which is encoded in the 5′ portion of the CH2 exon, provides flexibility within the antibody for binding to FcR receptors.

[0097] A “chimeric antibody” is an antibody molecule in which (a) the constant region, or a portion thereof, is altered, replaced or exchanged so that the antigen binding site (variable region) is linked to a constant region of a different or altered class, effector function and/or species, or an entirely different molecule which confers new properties to the chimeric antibody, e.g., an enzyme, toxin, hormone, growth factor, and drug; or (b) the variable region, or a portion thereof, is altered, replaced or exchanged with a variable region having a different or altered antigen specificity.

[0098] A “humanized” antibody is an antibody that retains the reactivity (e.g., binding specificity, activity) of a non-human antibody while being less immunogenic in humans. This can be achieved, for instance, by retaining non-human CDR regions and replacing remaining parts of an antibody with human counterparts. See, e.g., Morrison et al., Proc. Natl. Acad. Sci. USA, 81:6851-6855 (1984); Morrison and Oi, Adv. Immunol., 44:65-92 (1988); Verhoeyen et al., Science, 239:1534-1536 (1988); Padlan, Molec. Immun., 28:489-498 (1991); Padlan, Molec. Immun., 31(3):169-217 (1994).

[0099] A “human antibody” includes antibodies having variable regions in which both the framework and CDR regions are derived from sequences of human origin. Furthermore, if an antibody contains a constant region, the constant region also is derived from such human sequences, e.g., human germline sequences, or mutated versions of human germline sequences or antibody containing consensus framework sequences derived from human framework sequences analysis, for example, as described in Knappik et al., J. Mol. Biol. 296:57-86, 2000). Human antibodies may include amino acid residues not encoded by human sequences (e.g., mutations introduced by random or site-specific mutagenesis in vitro or by somatic mutation in vivo, or a conservative substitution to promote stability or manufacturing).

[0100] The term “corresponding human germline sequence” refers to a nucleic acid sequence encoding a human variable region amino acid sequence or subsequence that shares the highest determined amino acid sequence identity with a reference variable region amino acid sequence or subsequence in comparison to all other all other known variable region amino acid sequences encoded by human germline immunoglobulin variable region sequences. A corresponding human germline sequence can also refer to the human variable region amino acid sequence or subsequence with the highest amino acid sequence identity with a reference variable region amino acid sequence or subsequence in comparison to all other evaluated variable region amino acid sequences. A corresponding human germline sequence can be framework regions only, complementary determining regions only, framework and complementary determining regions, a variable segment (as defined above), or other combinations of sequences or sub-sequences that comprise a variable region. Sequence identity can be determined using the methods described herein, for example, aligning two sequences using BLAST, ALIGN, or another alignment algorithm known in the art. The corresponding human germline nucleic acid or amino acid sequence can have at least about 90%, 91%, 92%, 93%, 94%, 95%, 96%, 97%, 98%, 99%, or 100% sequence identity with the reference variable region nucleic acid or amino acid sequence.

[0101] The term “valency” as used herein refers to the number of potential target binding sites in a polypeptide. Each target binding site specifically binds one target molecule or a specific site on a target molecule. When a polypeptide comprises more than one target binding site, each target binding site may specifically bind the same or different molecules (e.g., may bind to different molecules, e.g., different antigens, or different epitopes on the same molecule). A conventional antibody, for example, has two binding sites and is bivalent; “trivalent” and “tetravalent” refer to the presence of three binding sites and four binding sites, respectively, in an antibody molecule. The ACE proteins can be monovalent (i.e., bind one target molecule), bivalent, or multivalent (i.e., bind more than one target molecule).

[0102] The phrase “specifically binds” when used in the context of describing the interaction between a target (e.g., a protein) and an ACE protein, refers to a binding reaction that is determinative of the presence of the target in a heterogeneous population of proteins and other biologics, e.g., in a biological sample, e.g., a blood, serum, plasma or tissue sample. Thus, under certain designated conditions, an ACE protein with a particular binding specificity binds to a particular target at least two times the background and do not substantially bind in a significant amount to other targets present in the sample. In one embodiment, under designated conditions, an ACE protein with a particular binding specificity bind to a particular antigen at least ten (10) times the background and do not substantially bind in a significant amount to other targets present in the sample. Specific binding to an ACE protein under such conditions can require an ACE protein to have been selected for its specificity for a particular target protein. As used herein, specific binding includes ACE proteins that selectively bind to a human cytokine receptor and do not include ACE proteins that cross-react with, e.g., other cytokine receptor superfamily members. In some embodiments, ACE proteins are selected that selectively bind to the human cytokine receptor and cross-react with non-human primate cytokine receptors (e.g., cynomolgus). In some embodiments, antibody engrafted proteins are selected that selectively bind to human cytokine receptors and react with an additional target. A variety of formats may be used to select ACE proteins that are specifically reactive with a particular target protein. For example, solid-phase ELISA immunoassays are routinely used to select antibodies specifically immunoreactive with a protein (see, e.g., Harlow & Lane, Using Antibodies, A Laboratory Manual (1998), for a description of immunoassay formats and conditions that can be used to determine specific immunoreactivity). Typically a specific or selective binding reaction will produce a signal at least twice over the background signal and more typically at least than 10 to 100 times over the background.

[0103] The term “equilibrium dissociation constant (K_{D}, M)” refers to the dissociation rate constant (k_{d}, time divided by the association rate constant (kₐ, time⁻¹, M⁻¹). Equilibrium dissociation constants can be measured using any known method in the art. The ACE proteins generally will have an equilibrium dissociation constant of less than about 10⁻⁷ or 10⁻⁸ M, for example, less than about 10⁻⁹ M or 10⁻¹⁰ M, in some embodiments, less than about 10⁻¹¹ M, 10⁻¹² M or 10⁻¹³ M.

[0104] As used herein, the term “epitope” or “binding region” refers to a domain in the antigen protein that is responsible for the specific binding between the antibody CDRs and the antigen protein.

[0105] As used herein, the term “receptor-cytokine binding region” refers to a domain in the engrafted cytokine portion of the ACE protein that is responsible for the specific binding between the engrafted cytokine and its receptor. There is at least one such receptor-cytokine binding region present in each ACE protein, and each of the binding regions may be identical or different from the others.

[0106] The term “agonist” refers to an antibody capable of activating a receptor to induce a full or partial receptor-mediated response. For example, an agonist of the cytokine receptor binds to the receptor and induces cytokine-mediated intracellular signaling, cell activation and/or proliferation of T cells. The ACE protein agonist stimulates signaling through its receptor similarly in some respects to the native cytokine. For example, the binding of cytokine to its receptor induces downstream signaling, for example, Jak1 and Jak3 activation which results in STAT5 phosphorylation. In some embodiments, an ACE protein agonist can be identified by its ability to bind its receptor and induce a biological effect such as cell proliferation or STAT phosphorylation.

[0107] The term “ACE protein” or “antibody cytokine engrafted molecule” or “engrafted” means that at least one cytokine is incorporated directly within a CDR of the antibody, interrupting the sequence of the CDR. The cytokine can be incorporated within HCDR1, HCDR2, HCDR3, LCDR1, LCDR2 or LCDR3. The cytokine can be incorporated within HCDR1, HCDR2, HCDR3, LCDR1, LCDR2 or LCDR3 and incorporated toward the N-terminal sequence of the CDR or toward the C-terminal sequence of the CDR. The cytokine incorporated within a CDR can disrupt the specific binding of the antibody portion to the original target protein or the ACE protein can retain its specific binding to its target protein.

[0108] The term “isolated,” when applied to a nucleic acid or protein, denotes that the nucleic acid or protein is essentially free of other cellular components with which it is associated in the natural state. It is preferably in a homogeneous state. It can be in either a dry or aqueous solution. Purity and homogeneity are typically determined using analytical chemistry techniques such as polyacrylamide gel electrophoresis or high performance liquid chromatography. A protein that is the predominant species present in a preparation is substantially purified. In particular, an isolated gene is separated from open reading frames that flank the gene and encode a protein other than the gene of interest. The term “purified” denotes that a nucleic acid or protein gives rise to essentially one band in an electrophoretic gel. Particularly, it means that the nucleic acid or protein is at least 85% pure, more preferably at least 95% pure, and most preferably at least 99% pure.

[0109] The term “nucleic acid” or “polynucleotide” refers to deoxyribonucleic acids (DNA) or ribonucleic acids (RNA) and polymers thereof in either single- or double-stranded form. Unless specifically limited, the term encompasses nucleic acids containing known analogues of natural nucleotides that have similar binding properties as the reference nucleic acid and are metabolized in a manner similar to naturally occurring nucleotides. Unless otherwise indicated, a particular nucleic acid sequence also implicitly encompasses conservatively modified variants thereof (e.g., degenerate codon substitutions), alleles, orthologs, SNPs, and complementary sequences as well as the sequence explicitly indicated. Specifically, degenerate codon substitutions may be achieved by generating sequences in which the third position of one or more selected (or all) codons is substituted with mixed-base and/or deoxyinosine residues (Batzer et al., Nucleic Acid Res. 19:5081 (1991); Ohtsuka et al., J. Biol. Chem. 260:2605-2608 (1985); and Rossolini et al., Mol. Cell. Probes 8:91-98 (1994)).

[0110] The terms “polypeptide,” “peptide,” and “protein” are used interchangeably herein to refer to a polymer of amino acid residues. The terms apply to amino acid polymers in which one or more amino acid residue is an artificial chemical mimetic of a corresponding naturally occurring amino acid, as well as to naturally occurring amino acid polymers and non-naturally occurring amino acid polymer.

[0111] The term “amino acid” refers to naturally occurring and synthetic amino acids, as well as amino acid analogs and amino acid mimetics that function in a manner similar to the naturally occurring amino acids. Naturally occurring amino acids are those encoded by the genetic code, as well as those amino acids that are later modified, e.g., hydroxyproline, γ-carboxyglutamate, and O-phosphoserine Amino acid analogs refer to compounds that have the same basic chemical structure as a naturally occurring amino acid, i.e., an α-carbon that is bound to a hydrogen, a carboxyl group, an amino group, and an R group, e.g., homoserine, norleucine, methionine sulfoxide, methionine methyl sulfonium. Such analogs have modified R groups (e.g., norleucine) or modified peptide backbones, but retain the same basic chemical structure as a naturally occurring amino acid Amino acid mimetics refers to chemical compounds that have a structure that is different from the general chemical structure of an amino acid, but that functions in a manner similar to a naturally occurring amino acid.

[0112] “Conservatively modified variants” applies to both amino acid and nucleic acid sequences. With respect to particular nucleic acid sequences, conservatively modified variants refers to those nucleic acids which encode identical or essentially identical amino acid sequences, or where the nucleic acid does not encode an amino acid sequence, to essentially identical sequences. Because of the degeneracy of the genetic code, a large number of functionally identical nucleic acids encode any given protein. For instance, the codons GCA, GCC, GCG, and GCU all encode the amino acid alanine. Thus, at every position where an alanine is specified by a codon, the codon can be altered to any of the corresponding codons described without altering the encoded polypeptide. Such nucleic acid variations are “silent variations,” which are one species of conservatively modified variations. Every nucleic acid sequence herein which encodes a polypeptide also describes every possible silent variation of the nucleic acid. One of skill will recognize that each codon in a nucleic acid (except AUG, which is ordinarily the only codon for methionine, and TGG, which is ordinarily the only codon for tryptophan) can be modified to yield a functionally identical molecule. Accordingly, each silent variation of a nucleic acid that encodes a polypeptide is implicit in each described sequence.

[0113] As to amino acid sequences, one of skill will recognize that individual substitutions, deletions or additions to a nucleic acid, peptide, polypeptide, or protein sequence which alters, adds or deletes a single amino acid or a small percentage of amino acids in the encoded sequence is a “conservatively modified variant” where the alteration results in the substitution of an amino acid with a chemically similar amino acid. Conservative substitution tables providing functionally similar amino acids are well known in the art. Such conservatively modified variants are in addition to and do not exclude polymorphic variants, interspecies homologs, and alleles. The following eight groups each contain amino acids that are conservative substitutions for one another: 1) Alanine (A), Glycine (G); 2) Aspartic acid (D), Glutamic acid (E); 3) Asparagine (N), Glutamine (Q); 4) Arginine (R), Lysine (K); 5) Isoleucine (I), Leucine (L), Methionine (M), Valine (V); 6) Phenylalanine (F), Tyrosine (Y), Tryptophan (W); 7) Serine (S), Threonine (T); and 8) Cysteine (C), Methionine (M) (see, e.g., Creighton, Proteins (1984)).

[0114] “Percentage of sequence identity” is determined by comparing two optimally aligned sequences over a comparison window, wherein the portion of the polynucleotide sequence in the comparison window may comprise additions or deletions (i.e., gaps) as compared to the reference sequence (e.g., a polypeptide), which does not comprise additions or deletions, for optimal alignment of the two sequences. The percentage is calculated by determining the number of positions at which the identical nucleic acid base or amino acid residue occurs in both sequences to yield the number of matched positions, dividing the number of matched positions by the total number of positions in the window of comparison and multiplying the result by 100 to yield the percentage of sequence identity.

[0115] The terms “identical” or percent “identity,” in the context of two or more nucleic acids or polypeptide sequences, refer to two or more sequences or subsequences that are the same sequences. Two sequences are “substantially identical” if two sequences have a specified percentage of amino acid residues or nucleotides that are the same (i.e., at least 85%, 90%, 91%, 92%, 93%, 94%, 95%, 96%, 97%, 98%, 99% or 100% sequence identity over a specified region, or, when not specified, over the entire sequence of a reference sequence), when compared and aligned for maximum correspondence over a comparison window, or designated region as measured using one of the following sequence comparison algorithms or by manual alignment and visual inspection. The disclosure provides polypeptides or polynucleotides that are substantially identical to the polypeptides or polynucleotides, respectively, exemplified herein (e.g., the variable regions exemplified in any one of the sequences in TABLE 2. The identity exists over a region that is at least about 15, 25 or 50 nucleotides in length, or more preferably over a region that is 100 to 500 or 1000 or more nucleotides in length, or over the full length of the reference sequence. With respect to amino acid sequences, identity or substantial identity can exist over a region that is at least 5, 10, 15 or 20 amino acids in length, optionally at least about 25, 30, 35, 40, 50, 75 or 100 amino acids in length, optionally at least about 150, 200 or 250 amino acids in length, or over the full length of the reference sequence. With respect to shorter amino acid sequences, e.g., amino acid sequences of 20 or fewer amino acids, substantial identity exists when one or two amino acid residues are conservatively substituted, according to the conservative substitutions defined herein.

[0116] For sequence comparison, typically one sequence acts as a reference sequence, to which test sequences are compared. When using a sequence comparison algorithm, test and reference sequences are entered into a computer, subsequence coordinates are designated, if necessary, and sequence algorithm program parameters are designated. Default program parameters can be used, or alternative parameters can be designated. The sequence comparison algorithm then calculates the percent sequence identities for the test sequences relative to the reference sequence, based on the program parameters.

[0117] A “comparison window,” as used herein, includes reference to a segment of any one of the number of contiguous positions selected from the group consisting of from 20 to 600, usually about 50 to about 200, more usually about 100 to about 150 in which a sequence may be compared to a reference sequence of the same number of contiguous positions after the two sequences are optimally aligned. Methods of alignment of sequences for comparison are well known in the art. Optimal alignment of sequences for comparison can be conducted, e.g., by the local homology algorithm of Smith and Waterman (1970) Adv. Appl. Math. 2:482c, by the homology alignment algorithm of Needleman and Wunsch (1970) J. Mol. Biol. 48:443, by the search for similarity method of Pearson and Lipman (1988) Proc. Nat'l. Acad. Sci. USA 85:2444, by computerized implementations of these algorithms (GAP, BESTFIT, FASTA, and TFASTA in the Wisconsin Genetics Software Package, Genetics Computer Group, 575 Science Dr., Madison, Wis.), or by manual alignment and visual inspection (see, e.g., Ausubel et al., Current Protocols in Molecular Biology (1995 supplement)).

[0118] Two examples of algorithms that are suitable for determining percent sequence identity and sequence similarity are the BLAST and BLAST 2.0 algorithms, which are described in Altschul et al. (1977) Nuc. Acids Res. 25:3389-3402, and Altschul et al. (1990) J. Mol. Biol. 215:403-410, respectively. Software for performing BLAST analyses is publicly available through the National Center for Biotechnology Information. This algorithm involves first identifying high scoring sequence pairs (HSPs) by identifying short words of length W in the query sequence, which either match or satisfy some positive-valued threshold score T when aligned with a word of the same length in a database sequence. T is referred to as the neighborhood word score threshold (Altschul et al., supra). These initial neighborhood word hits act as seeds for initiating searches to find longer HSPs containing them. The word hits are extended in both directions along each sequence for as far as the cumulative alignment score can be increased. Cumulative scores are calculated using, for nucleotide sequences, the parameters M (reward score for a pair of matching residues; always >0) and N (penalty score for mismatching residues; always <0). For amino acid sequences, a scoring matrix is used to calculate the cumulative score. Extension of the word hits in each direction are halted when: the cumulative alignment score falls off by the quantity X from its maximum achieved value; the cumulative score goes to zero or below, due to the accumulation of one or more negative-scoring residue alignments; or the end of either sequence is reached. The BLAST algorithm parameters W, T, and X determine the sensitivity and speed of the alignment. The BLASTN program (for nucleotide sequences) uses as defaults a wordlength (W) of 11, an expectation (E) or 10, M=5, N=−4 and a comparison of both strands. For amino acid sequences, the BLASTP program uses as defaults a wordlength of 3, and expectation (E) of 10, and the BLOSUM62 scoring matrix (see Henikoff and Henikoff (1989) Proc. Natl. Acad. Sci. USA 89:10915) alignments (B) of 50, expectation (E) of 10, M=5, N=−4, and a comparison of both strands.

[0119] The BLAST algorithm also performs a statistical analysis of the similarity between two sequences (see, e.g., Karlin and Altschul (1993) Proc. Natl. Acad. Sci. USA 90:5873-5787). One measure of similarity provided by the BLAST algorithm is the smallest sum probability (P(N)), which provides an indication of the probability by which a match between two nucleotide or amino acid sequences would occur by chance. For example, a nucleic acid is considered similar to a reference sequence if the smallest sum probability in a comparison of the test nucleic acid to the reference nucleic acid is less than about 0.2, more preferably less than about 0.01, and most preferably less than about 0.001.

[0120] An indication that two nucleic acid sequences or polypeptides are substantially identical is that the polypeptide encoded by the first nucleic acid is immunologically cross reactive with the antibodies raised against the polypeptide encoded by the second nucleic acid, as described below. Thus, a polypeptide is typically substantially identical to a second polypeptide, for example, where the two peptides differ only by conservative substitutions. Another indication that two nucleic acid sequences are substantially identical is that the two molecules or their complements hybridize to each other under stringent conditions, as described below. Yet another indication that two nucleic acid sequences are substantially identical is that the same primers can be used to amplify the sequence.

[0121] The term “link,” or “linked” when used in the context of describing how the binding regions are connected within an ACE protein of this invention, encompasses all possible means for physically joining the regions. The multitude of binding regions are frequently joined by chemical bonds such as a covalent bond (e.g., a peptide bond or a disulfide bond) or a non-covalent bond, which can be either a direct bond (i.e., without a linker between two binding regions) or indirect bond (i.e., with the aid of at least one linker molecule between two or more binding regions).

[0122] The terms “subject,” “patient,” and “individual” interchangeably refer to a mammal, for example, a human or a non-human primate mammal. The mammal can also be a laboratory mammal, e.g., mouse, rat, rabbit, hamster. In some embodiments, the mammal can be an agricultural mammal (e.g., equine, ovine, bovine, porcine, camelid) or domestic mammal (e.g., canine, feline).

[0123] As used herein, the terms “treat,” “treating,” or “treatment” of any disease or disorder refer in one embodiment, to ameliorating the disease or disorder (i.e., slowing or arresting or reducing the development of the disease or at least one of the clinical symptoms thereof). In another embodiment, “treat,” “treating,” or “treatment” refers to alleviating or ameliorating at least one physical parameter including those which may not be discernible by the patient. In yet another embodiment, “treat,” “treating,” or “treatment” refers to modulating the disease or disorder, either physically, (e.g., stabilization of a discernible symptom), physiologically, (e.g., stabilization of a physical parameter), or both. In yet another embodiment, “treat,” “treating,” or “treatment” refers to preventing or delaying the onset or development or progression of a disease or disorder.

[0124] The term “therapeutically acceptable amount” or “therapeutically effective dose” interchangeably refer to an amount sufficient to effect the desired result (i.e., reduction in tumor volume). In some embodiments, a therapeutically acceptable amount does not induce or cause undesirable side effects. A therapeutically acceptable amount can be determined by first administering a low dose, and then incrementally increasing that dose until the desired effect is achieved. A “prophylactically effective dosage,” and a “therapeutically effective dosage,” of an ACE protein can prevent the onset of, or result in a decrease in severity of, respectively, disease symptoms, including symptoms associated with cancer and cancer treatment.

[0125] The term “co-administer” refers to the simultaneous presence of two (or more) active agents in an individual. Active agents that are co-administered can be concurrently or sequentially delivered.

[0126] As used herein, the phrase “consisting essentially of” refers to the genera or species of active pharmaceutical agents included in a method or composition, as well as any inactive carrier or excipients for the intended purpose of the methods or compositions. In some embodiments, the phrase “consisting essentially of” expressly excludes the inclusion of one or more additional active agents other than an ACE protein. In some embodiments, the phrase “consisting essentially of” expressly excludes the inclusion of more additional active agents other than an ACE protein and a second co-administered agent.

[0127] The terms “a,” “an,” and “the” include plural referents, unless the context clearly indicates otherwise.

### BRIEF DESCRIPTION OF THE DRAWINGS

[0128] FIG. 1A/C is a schematic of four helix bundle cytokine topology a) the left handed arrangement of helices numbered A-D as seen from above adapted from (Presnell and Cohen, 1989). b) Two dimensional connection schematic of helices for the short and long chain cytokine family. c) Two dimensional connection schematic of the IL10, interferon family showing inserted helices relative to b) in the A/B and C/D overhand loops.

[0129] FIG. 2A/D demonstrates examples of the diversity of structure of the different four helix bundle cytokine families, helices are numbered sequentially by letter from N-terminus to C-terminus a) Short chain cytokine IL4, b) Long chain cytokine, IL6, c) IL10 family showing the monomer IL10 arrangement of the E F helices motif utilized to interdigitate with another IL monomer to generate a functional dimer, c) IL22, another member of the IL10 family this time forming a monomer six helix bundle.

[0130] FIG. 3A/B shows the activity of IL7 ACE proteins on CD8 and CD4 cells.

[0131] FIG. 4A compares pSTAT5 activity of IL7 ACE proteins on CD4 T cells, CD8 T cells, B cells and NK cells. FIG. 4B shows the effects of increasing concentrations of IL7 ACE protein on CD8 T cells as measured by pSTAT5. FIG. 4C shows the effects of increasing concentrations of IL7 ACE protein on CD4 T cells as measured by pSTAT5.

[0132] FIGS. 5A-5D is show the pharmacodynamics of IL7 ACE proteins, demonstrating increased CD8 T cell proliferation.

[0133] FIGS. 6A-6B demonstrates that IL7 ACE proteins reduce tumor growth as a single agent. FIG. 6C shows the increase in CD8 T cells in the blood. FIG. 6D shows the increase of CD8 tumor infiltrating lymphocytes upon administration of IL7 ACE protein. FIG. 6E shows the increase of CD4 tumor infiltrating lymphocytes upon administration of IL7 ACE protein.

[0134] FIG. 7 is a graphical representation of the synergistic combination of IL7 ACE proteins with an anti-PD-L1 antibody.

[0135] FIG. 8 is a structural diagram of IL7 inserted into HCDR2 or HCDR3 respectively.

[0136] FIG. 9 is a graph of the binding of various IL7 antibody cytokine engrafted proteins to RSV.

[0137] FIG. 10 is a Gyros assay showing that IL7 antibody cytokine engrafted proteins have a longer half-life than recombinant IL7.

[0138] FIG. 11 is a FACS plot and graphs showing the expansion of CD8+ cells in the blood upon administration of IL7 antibody cytokine engrafted proteins as a single agent and upon administration of IL7 antibody cytokine engrafted proteins in combination with an anti-PD-L1 antibody.

[0139] FIG. 12 shows that IL7 antibody cytokine engrafted proteins induces the reduction of Tim-3, either alone or in combination with anti-PD-L1.

[0140] FIG. 13 shows the increase in total numbers of naïve, central memory and effector memory CD8+ T cells in the blood upon dosing with IL7 antibody cytokine engrafted proteins.

[0141] FIG. 14 demonstrates that administration of IL7 antibody cytokine engrafted protein also induces an increase in CD8+PD-1+ cells.

[0142] FIG. 15 shows that administration of IL7 antibody cytokine engrafted proteins were able to reduce viral load as a single agent, or in combination with an anti-PD-L1 antibody.

[0143] FIG. 16 demonstrates that the administration of IL7 antibody cytokine engrafted proteins, in combination with anti-PD-L1, resulted in the increase of IFN-gamma.

[0144] FIG. 17 is a table of antibody cytokine engrafted constructs, showing that IgG.IL2D49A.H1 preferentially expands Tregs. This figure also shows a number of ACE proteins made. Wild type IL2 was cloned into all six CDRs and the N-terminus of HCDR1 (nH1), the C-terminus of HCDR1(cH1), the N-terminus of HCDR2(nH2), and the C-terminus of HCDR2(cH2). Engrafting wild type into LCDR2 resulted in an ACE protein that did not express.

[0145] FIG. 18 is a table comparing antibody cytokine engrafted proteins with recombinant IL2 (Proleukin®). Note that the IgG.IL2D49.H1 molecule stimulates the IL2 receptor on Treg cells, but not on T effector cells (Teff) or NK cells as measured by STAT5 phosphorylation. This molecule also has a longer half-life than Proleukin® and causes greater expansion of Treg cells in vivo.

[0146] FIG. 19 is a table of the fold changes in a panel of different immunomodulatory cell types when equimolar doses of antibody cytokine engrafted proteins, for example IgG.IL2D49.H1, are compared to Proleukin®.

[0147] FIG. 20 represents the differential activation of the IL2 low affinity or high affinity receptor by antibody cytokine engrafted protein as compared to Proleukin® and as measured by STAT5 phosphorylation. Note that the IgG.IL2D49A.H1 stimulates the high affinity IL2 receptors expressed on Treg cells but not on CD4+ or CD8+ Tcon cells.

[0148] FIG. 21 shows in graphical form that Tregs expanded with antibody cytokine engrafted proteins (e.g. IgG.IL2D49A.H1) are better suppressors of Teffector cells (Teff) (see upper panel). The lower panel shows that Treg cells expanded by antibody cytokine engrafted proteins are stable by Foxp3 protein expression and by Foxp3 methylation.

[0149] FIG. 22 demonstrates that antibody cytokine engrafted proteins have little to no effect on NK cells which express the IL2 low affinity receptor. In contrast, Proleukin® stimulates NK cells as measured by pSTAT5 activation.

[0150] FIG. 23 is a pharmacokinetic (PK), pharmacodynamic (PD) and toxicity profile of antibody cytokine engrafted protein compared to Proleukin® in cynomolgous monkeys. For example, IgG.IL2D49A.H1 has a much reduced eosinophilia toxicity profile than Proleukin®.

[0151] FIG. 24 is a graph depicting the extended half-life of IgG.IL2D49.H1.

[0152] FIG. 25 is a graphic representation of antibody cytokine engrafted protein molecules in a mouse GvHD model. This shows that treatment with antibody cytokine engrafted proteins in this model expand Tregs better than Proleukin®, while having little to no effect on CD4+/CD8+ Teff cells or NK cells.

[0153] FIG. 26 shows graphically the loss of body weight associated with Proleukin® treatment in a GvHD mouse model, while there is little body weight loss associated with administration of IgG.IL2D49.H1.

[0154] FIG. 27 compares antibody cytokine engrafted proteins to Proleukin® in a prediabetic (NOD) mouse model, and demonstrates that IgG.IL2D49A.H1 prevents Type 1 diabetes in this model.

[0155] FIG. 28 compares the ratio of Treg to CD8 Teffector cells in a pre-diabetic NOD mouse model.

[0156] FIG. 29 shows the pharmacokinetics of IgG.IL2D49A.H1 in the NOD mouse model at a 1.3 mg/kg dose.

[0157] FIG. 30 shows the pharmacokinetics of IgG.IL2D49A.H1 in the NOD mouse model at a 0.43 mg/kg dose.

[0158] FIG. 31 is a table of dose ranges used in the pre-diabetic NOD mouse model, and compares equimolar amounts of Proleukin®.

[0159] FIGS. 32-33 are a series of graphs depicting amount of pSTAT5 activation on human cells treated with IgG.IL2D49.H1. Cells were taken from a normal donor, a donor with vitiligo (FIG. 32) and type 1 diabetes (T1D) (FIG. 33).

[0160] FIG. 34 is a graph of the binding of various IL2 antibody cytokine engrafted proteins to RSV.

[0161] FIG. 35 shows Treg expansion in cynomolgus monkey after a single dose of IgG.IL2D49A.H1.

[0162] FIG. 36 is a table summarizing exemplary the IL2 antibody cytokine engrafted proteins and their activities on CD8 T effector cells.

[0163] FIG. 37 shows that IgG.IL2R67A.H1 has a greater half-life than that of Proleukin®. IgG.IL2R67A.H1 has a half-life of 12-14 hours as shown in the graph, while Proleukin® has a T1/2 of less than 4 hours and cannot be shown on the graph.

[0164] FIG. 38A-38C demonstrates that IgG.IL2R67A.H1 expands CD8+T effector cells more effectively and with less toxicity than Proleukin® or an IL2-Fc fusion molecule in C57BL/6 mice at a 100 μg equivalent dose, at day 4, day 8 and day 11 time points.

[0165] FIG. 38D-38F demonstrates that IgG.IL2R67A.H1 expands CD8+T effector cells more effectively and with less toxicity than Proleukin® or an IL2-Fc fusion molecule in C57BL/6 mice at a 500 μg equivalent dose at day 4, day 8 and day 11 time points.

[0166] FIG. 39A shows that IgG.IL2R67A.H1 selectively expands CD8 T effectors and is better tolerated than Proleukin® in NOD mice.

[0167] FIG. 39B is a table depicting the increased activity of IgG.IL2R67A.H1 and IgG.IL2F71A.H1 on CD8 T effectors in NOD mice.

[0168] FIG. 40 is a graph of single agent efficacy of IgG.IL2R67A.H1 in a CT26 tumor model.

[0169] FIG. 41 presents the data of IgG.IL2R67A.H1 either as a single agent or in combination with an antibody in a B16 melanoma mouse model. The graph shows that IgG.IL2R67A.H1 in combination with TA99, an anti-TRP1 antibody, is more efficacious than TA99 alone, an IL2-Fc fusion molecule alone or TA99 plus an IL2-Fc fusion. Synergy was seen with TA99 and IgG.IL2R67A.H1 at the 100 and 500 μg doses.

[0170] FIG. 42 is a graph with values monitoring pSTAT5 in a panel of human cells comparing IgG.IL2R67A.H1 with Proleukin® and a native IL-2 (no muteins) grafted into HCDR1 and HCDR2.

[0171] FIG. 43 is a graph of the binding of various IL2 antibody cytokine engrafted proteins to RSV.

[0172] FIG. 44 depicts results of CyTOF analysis of IL-6 dependent pSTAT1, pSTAT3, pSTAT4, and pSTAT5 signaling in human whole blood stimulated with equal molar amounts native human IL-6 or IL-6 antibody cytokine engrafted proteins.

[0173] FIG. 45 depicts results of CyTOF data of pSTAT1, pSTAT3, and pSTAT5 activity of various IL-6 antibody cytokine engrafted proteins on CD4 T cells, CD8 T cells, B cells, NK cells, monocytes, dendritic cells, etc.

[0174] FIGS. 46A and 46B show line graphs illustrating the half-life of the IL-6 antibody cytokine engrafted proteins IgG.IL-6.H2 and IgG.IL-6.H3 in an IL-6Fc Gyros assay in C57Bl/6 DIO mice.

[0175] FIG. 47 shows a dot plot illustrating in vivo activity of IL-6 antibody cytokine engrafted protein in fat and muscle tissues in C57Bl/6 DIO mice measured by phospho-Stat3 (pSTAT3) after subcutaneous dosing.

[0176] FIGS. 48A, 48B and 48C show line graphs illustrating in vivo activity of IL-6 antibody cytokine engrafted protein in C57Bl/6 DIO mice measured by changes in body weight (A), fat tissue (B) and lean tissue (C) after subcutaneous dosing.

[0177] FIGS. 49A, 49B and 49C show line graphs illustrating in vivo activity of IL-6 antibody cytokine engrafted protein in C57Bl/6 DIO mice measured by respiratory exchange ratio (RER) pre-dosing (A), at days 3-5 (B) and at days 7-9 (C) after subcutaneous dosing.

[0178] FIGS. 50A, 50B, 50C, 50D and 50E show graphs illustrating in vivo activity of IL-6 antibody cytokine engrafted protein on food intake in pair fed C57Bl/6 DIO mice measured by changes in body weight (A), food intake (B), over-all fat mass (C), lean mass (D) and tibialis anterior muscle weight (7E) after subcutaneous dosing.

[0179] FIG. 51A-51B depicts results of in vitro biological assays of recombinant human IL10 (rhIL10, gray square) and the IgGIL10M13 antibody cytokine engrafted protein (black triangle). FIG. 51A illustrates that IgGIL10M13 demonstrated decreased pro-inflammatory activity as compared to rhIL10 as measured by IFN gamma induction in CD8 T cell assays. Similar differential activity was found on human primary NK cells, B cells, and mast cells, as well as using granzyme-B as a readout measurement. FIG. 51B illustrates that rhIL10 and IgGIL10M13 demonstrate similar anti-inflammatory activity as measured by inhibition of TNFα in whole blood assays.

[0180] FIG. 52 depicts results of CyTOF analysis of IL10 dependent pSTAT3 signaling in human whole blood stimulated with equal molar amounts recombinant human IL10 rhIL10 (left panel) or IgGIL10M13 (right panel). IL10 induces anti-inflammatory activities in monocytes; and activation of T, B or NK cells induces pro-inflammatory cytokines. Results of fold change in activity of cells over unstimulated are depicted by heat map (changes in shading). Left panel indicates rhIL10 confers stimulation across all IL10 sensitive cell types (with outline); however, as seen in the right panel IgGIL10M13 confers less potent stimulation on T, B, and NK cells, with levels similar or slightly above unstimulated cells; while a similar potency of stimulation of monocytes (outlined) and mDC cells was demonstrated with IgG-IL10M and rhIL10. These relevant cell types (monocytes, mDC) are key cells for maintenance of gut homeostatis in inflammatory bowel disease.

[0181] FIG. 53A-53D illustrates improved characteristics of antibody cytokine engrafted protein IgGIL10M13 in in vivo assays. FIG. 53A-53B depicts results of pharmacokinetic studies of rhIL10 and IgGIL10M13. Following intravenous administration, IgGIL10M13 demonstrates prolonged pharmacokinetics (half-life) as antibody cytokine engrafted protein is still detectable after 4.4 days (FIG. 53B), while rhIL10 had a half-life of approximately 1 hour (FIG. 53A). FIGS. 53C and 53D depict results of pharmacodynamic assays of in vivo activity of antibody cytokine engrafted proteins. FIG. 53C depicts in vivo activity in colon tissue as measured by pSTAT3 signaling seventy-two (72) hours post dosing. FIG. 53D depicts improved duration of in vivo response of IgGIL10M13 as compared to rhIL10 as measured by inhibition of TNFα in response to LPS challenge following administration of IgGIL10M13.

[0182] FIG. 54 is the results of an LPS challenge model, demonstrating IgGIL10M13 reduces TNFα induction 48 hours after LPS challenge.

[0183] FIG. 55 is a graph representing the improved % CMAX of IL10 antibody cytokine engrafted proteins.

[0184] FIG. 56 depicts CyTOF data of pSTAT3 activity in various immune cells from healthy subjects and patients when stimulated with rhIL10 or with IgGIL10M13.

[0185] FIGS. 57-61 are graphical representations demonstrating IgGIL10M13 has reduced pro-inflammatory activity in PHA stimulated human whole blood compared to rhIL10.

[0186] FIG. 62 shows the graphs of a titration experiment with rhIL10 and IgGIL10M13.

[0187] FIGS. 63-64 depict the aggregation properties of IL10 wild type or monomeric when conjugated via a linker to an Fc, compared to the aggregation properties of an antibody cytokine engrafted protein.

[0188] FIG. 65 is ELISA data showing that the IL10 antibody cytokine engrafted protein still binds to RSV.

[0189] FIG. 66 is a representation of the mechanism of action of an IL10 antibody cytokine engrafted protein. The left panel shows how a normal rhIL10 dimer binds IL-10R1, and initiates strong pSTAT3 signaling. The right panel depicts how an IL10 monomer engrafted into a CDR of an antibody is constrained to have less efficient binding to IL-10R1 and thus produces a weaker pSTAT3 signal.

[0190] FIG. 67A-C is the crystal structure resolution of IL10 monomer engrafted into LCDR1 of palivizumab.

[0191] FIG. 68 is a graph and a table showing IC50 values for IL10 ACE proteins engrafted into a different antibody scaffold.

[0192] FIG. 69 is a graph and a table showing IC50 values for IL10 ACE proteins engrafted into a different antibody scaffold wherein the IL10 cytokine is engrafted into different CDRs.

[0193] FIG. 70A shows the expansion of CD8+ Teffector cells in a mouse model after treatment with an IL2 ACE protein engrafted into a different antibody scaffold.

[0194] FIG. 70B shows the expansion of CD4+ Treg cells in a mouse model after treatment with an IL2 ACE protein engrafted into a different antibody scaffold.

[0195] FIG. 70C shows the expansion of NK cells in a mouse model after treatment with an IL2 ACE protein engrafted into a different antibody scaffold.

[0196] FIGS. 71-100 is Cytof data showing the pSTAT activity for its respective ACE protein.

[0197] FIG. 101 shows that H1, H3 and L3 Flt3L grafts are capable of inducing B220+CD11c+ plasmacytoid DC differentiation (top panels) and CD370+DC1 differentiation (bottom panels) comparable to what is observed with recombinant human Flt3L. Top plots are gated on live, singlet cells. Bottom plots are gated on live, singlet cells that are CD11c+.

[0198] FIG. 102 shows that GM-CSF cytokine grafts are capable of inducing monocyte DC differentiation as evidenced by upregulation of DC-SIGN on the cells and downregulation of CD14. The event was specific to cells cultured with GM-CSF or GM-CSF containing grafts, as a Palivizumab graft control did not induce these cellular changes.

[0199] FIG. 103 shows that monocyte DCs generated with GM-CSF grafts are capable of responding to TLR7/8 activation. Cells were incubated with R848, a well characterized TLR7/8 agonist overnight and cell surface CD86 upregulation was measured as a marker of cellular activation. Monocyte DCs generated with wild type human GM-CSF or the GM-CSF grafts were equally capable of upregulating CD86 after R848 simulation, indicating functionality of the monocyte DCs generated with GM-CSF grafts.

### ACE PROTEINS

[0200] Embodiments disclosed herein provide ACE proteins comprising: (a) a heavy chain variable region (VH), comprising Complementarity Determining Regions (CDR) HCDR1, HCDR2, HCDR3; and (b) a light chain variable region (VL), comprising LCDR1, LCDR2, LCDR3; and (c) a cytokine molecule engrafted into a CDR of the VH or the VL.

[0201] In some embodiments, the cytokine molecule is directly engrafted into the CDR. In some embodiments, the cytokine molecule is directly engrafted into the CDR without a peptide linker, with no additional amino acids between the CDR sequence and the cytokine sequence.

[0202] In some embodiments, the cytokine molecules engrafted into the CDR belong to the 4-helix bundle family of cytokines. For example, the cytokine molecules may be chosen from those listed in Table 1. In some embodiments, the cytokine molecule is not interleukin-10 (IL-10). In some embodiments, the full-length cytokine molecule is engrafted into the CDR. In some embodiments, the cytokine molecule without the signal peptide is engrafted into the CDR.

[0203] Without being bound by theory, it is contemplated that by engrafting a cytokine molecule directly into the CDR sequence of an antibody scaffold, the natural conformation of the cytokine may or may not be modified by the CDR sequence or other part of the antibody scaffold, which may result in a change to the characteristics of the engrafted cytokine molecule. For example, depending on the length of the CDR sequence the cytokine molecule is engrafted into, its binding to a receptor(s) may be negatively or positively affected, as well as its signalling through the receptor(s).

[0204] Therefore, in some embodiments, the binding affinity of the engrafted cytokine molecule of the ACE protein to a receptor is increased in comparison to a free cytokine molecule. For example, the binding affinity of the engrafted cytokine molecule of the ACE protein to a receptor is increased by 10%, by 20%, by 30%, by 40%, by 50%, by 60%, by 70%, by 80%, by 90%, by 100%, by 2 fold, by 3 fold, by 4 fold, by 5 fold, by 10 fold, by 100 fold, by 1,000 fold, or more, in comparison to a free cytokine molecule.

[0205] In some embodiments, the binding affinity of the engrafted cytokine molecule of the ACE protein to a receptor is decreased in comparison to a free cytokine molecule. For example, the binding affinity of the engrafted cytokine molecule of the ACE protein to a receptor is decreased by 10%, by 20%, by 30%, by 40%, by 50%, by 60%, by 70%, by 80%, by 90%, by 95%, by 98%, by 99%, by 100%, in comparison to a free cytokine molecule.

[0206] In some embodiments, the binding avidity of the engrafted cytokine molecule of the ACE protein to a receptor is increased in comparison to a free cytokine molecule. For example, the binding avidity of the engrafted cytokine molecule of the ACE protein to a receptor is increased by 10%, by 20%, by 30%, by 40%, by 50%, by 60%, by 70%, by 80%, by 90%, by 100%, by 2 fold, by 3 fold, by 4 fold, by 5 fold, by 10 fold, by 100 fold, by 1,000 fold, or more, in comparison to a free cytokine molecule.

[0207] In some embodiments, the binding avidity of the engrafted cytokine molecule of the ACE protein to a receptor is decreased in comparison to a free cytokine molecule. For example, the binding avidity of the engrafted cytokine molecule of the ACE protein to a receptor is decreased by 10%, by 20%, by 30%, by 40%, by 50%, by 60%, by 70%, by 80%, by 90%, by 95%, by 98%, by 99%, by 100%, in comparison to a free cytokine molecule.

[0208] In some embodiments, the the differential binding affinity or avidity of the engrafted cytokine molecule of the ACE protein to two or more receptors is changed in comparison to a free cytokine molecule.

[0209] In some embodiments, an activity of the engrafted cytokine molecule of the ACE protein is increased in comparison to a free cytokine molecule. For example, the activity of the engrafted cytokine molecule of the ACE protein, e.g., cell-proliferation activity, anti-cell-proliferation activity, apoptotic activity, pro-inflammatory activity, anti-inflammatory activity, etc., is increased by 10%, by 20%, by 30%, by 40%, by 50%, by 60%, by 70%, by 80%, by 90%, by 100%, by 2 fold, by 3 fold, by 4 fold, by 5 fold, by 10 fold, by 100 fold, by 1,000 fold, or more, in comparison to a free cytokine molecule.

[0210] In some embodiments, an activity of the engrafted cytokine molecule of the ACE protein is decreased in comparison to a free cytokine molecule. For example, the activity of the engrafted cytokine molecule of the ACE protein, e.g., cell-proliferation activity, anti-cell-proliferation activity, apoptotic activity, pro-inflammatory activity, anti-inflammatory activity, etc., is decreased by 10%, by 20%, by 30%, by 40%, by 50%, by 60%, by 70%, by 80%, by 90%, by 95%, by 98%, by 99%, by 100%, in comparison to a free cytokine molecule.

[0211] In some embodiments, the antibody cytokine engrafted confers anti-inflammatory properties superior to a free cytokine molecule. In some embodiments, the antibody cytokine engrafted proteins disclosed herein confer increased activity on Treg cells while providing reduced proportional pro-inflammatory activity as compared to the free cytokine molecule. In some embodiments, the antibody cytokine engrafted proteins disclosed herein provide preferential activation of Treg cells over Teff cells, Tcon cells, and/or NK cells. In some embodiments, the antibody cytokine engrafted proteins disclosed herein provide preferential expansion of Treg cells over Teff cells, Tcon cells, and/or NK cells. In some embodiments, the antibody cytokine engrafted proteins disclosed herein provide increased expansion of Treg cells without expansion of CD8 T effector cells or NK cells. In some embodiments, the antibody cytokine engrafted proteins disclosed herein provide a ratio of expansion of Treg cells:NK cells that is, is about, is greater than, 1, 2, 3, 4, 5, 6, 7, 8, 9, 10. In some embodiments, the antibody cytokine engrafted proteins disclosed herein provide a ratio of expansion of Treg cells:CD8 T effector cells that is, is about, is greater than, 1, 2, 3, 4, 5, 6, 7, 8, 9, 10. In some embodiments, the antibody cytokine engrafted proteins disclosed herein provide a ratio of expansion of Treg cells:CD4 Tcon cells that is, is about, is greater than, 1, 2, 3, 4, 5, 6, 7, 8, 9, 10.

[0212] In some embodiments, the antibody cytokine engrafted proteins disclosed herein provide receptor signalling potency that is reduced in CD4 Tcon cells in comparison to the free cytokine molecule. In some embodiments, the antibody cytokine engrafted proteins disclosed herein provide receptor signalling potency that is reduced in CD8 Teff cells in comparison to the free cytokine molecule. In some embodiments, the antibody cytokine engrafted proteins disclosed herein provide receptor signalling potency that is reduced in NK cells in comparison to the free cytokine molecule. In some embodiments, the antibody cytokine engrafted proteins disclosed herein provide specific activation of Treg cells over CD4 T effector cells that is about 1,000 fold, about 2,000 fold, about 3,000 fold, about 4,000 fold, about 5,000 fold, about 6,000 fold, about 7,000 fold, about 8,000 fold, about 9,000 fold, about 10,000 fold, or more, higher than the free cytokine molecule. In some embodiments, the antibody cytokine engrafted proteins disclosed herein provide specific activation of Treg cells over CD8 T effector cells that is about 100 fold, about 200 fold, about 300 fold, about 400 fold, about 500 fold, about 600 fold, about 700 fold, about 800 fold, about 900 fold, about 1,000 fold, or more, higher than the free cytokine molecule. In some embodiments, the antibody cytokine engrafted proteins disclosed herein provide specific activation of Treg cells over CD8 T effector/memory cells that is about 100 fold, about 200 fold, about 300 fold, about 400 fold, about 500 fold, about 600 fold, about 700 fold, about 800 fold, about 900 fold, about 1,000 fold, or more, higher than the free cytokine molecule.

[0213] In some embodiments, the antibody cytokine engrafted proteins disclosed herein provide reduced toxicity the free cytokine. In some embodiments, the antibody cytokine engrafted proteins disclosed herein provide increased half life, such as more than 4 hours, more than 6 hours, more than 8 hours, more than 12 hours, more than 24 hours, more than 48 hours, more than 3 days, more than 4 days, more than 7 days, more than 14 days, or longer.

[0214] In some embodiments antibody cytokine engrafted proteins comprise heavy and light chain immunoglobulin sequences having binding specificity of the immunoglobulin variable domains to a target distinct from the binding specificity of the cytokine molecule. In some embodiments the binding specificity of the immunoglobulin variable domain to its target is retained by 10%, 20%, 30%, 40%, 50%, 60%, 70%, 80%, 90%, 95%, 98%, 99%, or 100%, in the presence of the engrafted cytokine. In certain embodiments the retained binding specificity is to a non-human target. In certain embodiments the retained binding specificity it to a virus, for example, RSV. In other embodiments the binding specificity is to a human target having therapeutic utility in conjunction with the cytokine molecule. In certain embodiments, targeting the binding specificity of the immunoglobulin conveys additional therapeutic benefit to the cytokine. In certain embodiments the binding specificity of the immunoglobulin to its target conveys synergistic activity with the cytokine.

[0215] In still other embodiments, the binding specificity of the immunoglobulin to its target is reduced 10%, 20%, 30%, 40%, 50%, 60%, 70%, 80%, 90%, 95%, 98%, 99%, or 100% by the engrafting of the cytokine molecule.

### ACE Proteins Targeting the IL7Ra

[0216] Provided herein are ACE proteins comprising an IL7 molecule engrafted into the complementarity determining region (CDR) of an antibody. The ACE proteins of the present disclosure show suitable properties to be used in human patients, for example, they retain immunostimulatory activity similar to that of native or recombinant human IL7. Other activities and characteristics are also demonstrated throughout the specification. Thus, provided are ACE proteins having an improved therapeutic profile over previously known IL7 and modified IL7 therapeutic agents, and methods of use of the provided ACE proteins in cancer treatment.

[0217] Accordingly, the present disclosure provides ACE proteins that are agonists of the IL7Ra, with selective activity profiles. Provided ACE proteins comprise an immunoglobulin heavy chain sequence and an immunoglobulin light chain sequence. Each immunoglobulin heavy chain sequence comprises a heavy chain variable region (VH) and a heavy chain constant region (CH), wherein the heavy chain constant region consists of CH1, CH2, and CH3 constant regions. Each immunoglobulin light chain sequence comprises a light chain variable region (VL) and a light chain constant region (CL). In each ACE protein an IL7 molecule is incorporated into a complementarity determining region (CDR) of the VH or VL.

[0218] In some embodiments, the ACE protein comprises an IL7 molecule incorporated into a heavy chain CDR. In certain embodiments IL7 is incorporated into heavy chain complementarity determining region 1 (HCDR1). In certain embodiments IL7 is incorporated into heavy chain complementarity determining region 2 (HCDR2). In certain embodiments IL7 is incorporated into heavy chain complementarity determining region 3 (HCDR3).

[0219] In some embodiments, the ACE protein comprises IL7 incorporated into a light chain CDR. In certain embodiments IL7 is incorporated into light chain complementarity determining region 1 (LCDR1). In certain embodiments IL7 is incorporated into light chain complementarity determining region 2 (LCDR2). In certain embodiments IL7 is incorporated into light chain complementarity determining region 3 (LCDR3).

[0220] In some embodiments, the ACE comprises an IL7 sequence incorporated into a CDR, whereby the IL7 sequence is inserted into the CDR sequence. The insertion may be at or near the N-terminal region of the CDR, in the middle region of the CDR or at or near the C-terminal region of the CDR. In other embodiments, the ACE comprises IL7 incorporated into a CDR, whereby the IL7 sequence does not frameshift the CDR sequence.

[0221] In some embodiments IL7 is engrafted directly into a CDR without a peptide linker, with no additional amino acids between the CDR sequence and the IL7 sequence.

[0222] In some embodiments ACE proteins comprise immunoglobulin heavy chains of an IgG class antibody heavy chain. In certain embodiments an IgG heavy chain is any one of an IgG1, an IgG2 or an IgG4 subclass.

### ACE Proteins Targeting the IL2 High Affinity Receptor

[0223] Provided herein are protein constructs comprising IL2 engrafted to into the complementarity determining region (CDR) of an antibody. The antibody cytokine engrafted proteins show suitable properties to be used in human patients, for example, they retain immunostimulatory activity on Treg cells similar to that of native or recombinant human IL2. However, the negative effects are diminished, for example stimulation of NK cells. Other activities and characteristics are also demonstrated throughout the specification. Thus, provided are antibody cytokine engrafted proteins having an improved therapeutic profile over previously known IL2 and modified IL2 therapeutic agents, and methods of use of the provided antibody cytokine engrafted proteins in therapy.

[0224] Accordingly, the present disclosure provides antibody cytokine engrafted proteins that are agonists of the IL2 high affinity receptor, with selective activity profiles. Provided antibody cytokine engrafted proteins comprising an immunoglobulin heavy chain sequence and an immunoglobulin light chain sequence. Each immunoglobulin heavy chain sequence comprises a heavy chain variable region (VH) and a heavy chain constant region (CH), wherein the heavy chain constant region consists of CH1, CH2, and CH3 constant regions. Each immunoglobulin light chain sequence comprises a light chain variable region (VL) and a light chain constant region (CL). In each antibody cytokine engrafted protein an IL2 molecule is incorporated into a complementarity determining region (CDR) of the VH or VL of the antibody.

[0225] In some embodiments, the antibody cytokine engrafted protein comprises IL2 incorporated into a heavy chain CDR. In certain embodiments IL2 is incorporated into heavy chain complementarity determining region 1 (HCDR1). In certain embodiments IL2 is incorporated into heavy chain complementarity determining region 2 (HCDR2). In certain embodiments monomeric IL2 is incorporated into heavy chain complementarity determining region 3 (HCDR3).

[0226] In some embodiments, the antibody cytokine engrafted protein comprises an IL2 incorporated into a light chain CDR. In certain embodiments IL2 is incorporated into light chain complementarity determining region 1 (LCDR1). In certain embodiments IL2 is incorporated into light chain complementarity determining region 2 (LCDR2). In certain embodiments IL2 is incorporated into light chain complementarity determining region 3 (LCDR3).

[0227] In some embodiments, the antibody cytokine engrafted comprises an IL2 sequence incorporated into a CDR, whereby the IL2 sequence is inserted into the CDR sequence. The insertion may be at or near the beginning of the CDR, in the middle region of the CDR or at or near the end of the CDR. In other embodiments, the antibody cytokine engrafted comprises IL2 incorporated into a CDR, whereby the IL2 sequence replaces all or part of a CDR sequence. A replacement may be at or near the beginning of the CDR, in the middle region of the CDR or at or near the end of the CDR. A replacement may be as few as one or two amino acids of a CDR sequence, or as many as an entire CDR sequence.

[0228] In some embodiments IL2 is incorporated directly into a CDR without a peptide linker, with no additional amino acids between the CDR sequence and the IL2 sequence.

[0229] In some embodiments antibody cytokine engrafted proteins comprise immunoglobulin heavy chains of an IgG class antibody heavy chain. In certain embodiments an IgG heavy chain is any one of an IgG1, an IgG2 or an IgG4 subclass.

[0230] In some embodiments antibody cytokine engrafted proteins comprise heavy and light chain immunoglobulin sequences selected from a known, clinically utilized immunoglobulin sequence. In certain embodiments antibody cytokine engrafted proteins comprise heavy and light chain immunoglobulin sequences which are humanized sequences. In other certain embodiments antibody cytokine engrafted proteins comprise heavy and light chain immunoglobulin sequences which are human sequences.

[0231] In some embodiments antibody cytokine engrafted proteins comprise heavy and light chain immunoglobulin sequences selected from germline immunoglobulin sequences.

[0232] In some embodiments antibody cytokine engrafted proteins comprise heavy and light chain immunoglobulin sequences having binding specificity of the immunoglobulin variable domains to a target distinct from the binding specificity of the IL2 molecule. In some embodiments the binding specificity of the immunoglobulin variable domain to its target is retained in the presence of the engrafted. In certain embodiments the retained binding specificity is to a non-human target. In other embodiments the binding specificity is to a human target having therapeutic utility in conjunction with IL2 therapy. In certain embodiments, targeting the binding specificity of the immunoglobulin conveys additional therapeutic benefit to the IL2 component. In certain embodiments the binding specificity of the immunoglobulin to its target conveys synergistic activity with IL2.

[0233] In still other embodiments, the binding specificity of the immunoglobulin to its target is reduced by the engrafting of the IL2 molecule.

### ACE Proteins Targeting the IL2 Low Affinity Receptor

[0234] Provided herein are antibody cytokine engrafted proteins comprising an IL2 molecule engrafted to into the complementarity determining region (CDR) of an antibody. The antibody cytokine engrafted proteins of the present disclosure show suitable properties to be used in human patients, for example, they retain immunostimulatory activity similar to that of native or recombinant human IL2. However, the negative effects are diminished. For example, there is less stimulation of Treg cells and an improved response of CD8 T effector cells. Other activities and characteristics are also demonstrated throughout the specification. Thus, provided are antibody cytokine engrafted proteins having an improved therapeutic profile over previously known IL2 and modified IL2 therapeutic agents, and methods of use of the provided antibody cytokine engrafted proteins in cancer treatment.

[0235] Accordingly, the present disclosure provides antibody cytokine engrafted proteins that are agonists of the IL2 low affinity receptor, with selective activity profiles. Provided antibody cytokine engrafted proteins comprise an immunoglobulin heavy chain sequence and an immunoglobulin light chain sequence. Each immunoglobulin heavy chain sequence comprises a heavy chain variable region (VH) and a heavy chain constant region (CH), wherein the heavy chain constant region consists of CH1, CH2, and CH3 constant regions. Each immunoglobulin light chain sequence comprises a light chain variable region (VL) and a light chain constant region (CL). In each antibody cytokine engrafted protein an IL2 molecule is incorporated into a complementarity determining region (CDR) of the VH or VL.

[0236] In some embodiments, the antibody cytokine engrafted protein comprises IL2 molecule incorporated into a heavy chain CDR. In certain embodiments IL2 is incorporated into heavy chain complementarity determining region 1 (HCDR1). In certain embodiments IL2 is incorporated into heavy chain complementarity determining region 2 (HCDR2). In certain embodiments IL2 is incorporated into heavy chain complementarity determining region 3 (HCDR3).

[0237] In some embodiments, the antibody cytokine engrafted protein comprises IL2 incorporated into a light chain CDR. In certain embodiments IL2 is incorporated into light chain complementarity determining region 1 (LCDR1). In certain embodiments IL2 is incorporated into light chain complementarity determining region 2 (LCDR2). In certain embodiments IL2 is incorporated into light chain complementarity determining region 3 (LCDR3).

[0238] In some embodiments, the antibody cytokine engrafted comprises an IL2 sequence incorporated into a CDR, whereby the IL2 sequence is inserted into the CDR sequence. The insertion may be at or near the N-terminal region of the CDR, in the middle region of the CDR or at or near the C-terminal region of the CDR. In other embodiments, the antibody cytokine engrafted comprises IL2 incorporated into a CDR, whereby the IL2 sequence does not frameshift the CDR sequence.

[0239] In some embodiments IL2 is engrafted directly into a CDR without a peptide linker, with no additional amino acids between the CDR sequence and the IL2 sequence.

[0240] In some embodiments antibody cytokine engrafted proteins comprise immunoglobulin heavy chains of an IgG class antibody heavy chain. In certain embodiments an IgG heavy chain is any one of an IgG1, an IgG2 or an IgG4 subclass.

[0241] In some embodiments antibody cytokine engrafted proteins comprise heavy and light chain immunoglobulin sequences selected from a known, clinically utilized immunoglobulin sequence. In certain embodiments antibody cytokine engrafted proteins comprise heavy and light chain immunoglobulin sequences which are humanized sequences. In other certain embodiments antibody cytokine engrafted proteins comprise heavy and light chain immunoglobulin sequences which are human sequences.

[0242] In some embodiments antibody cytokine engrafted proteins comprise heavy and light chain immunoglobulin sequences selected from germline immunoglobulin sequences.

[0243] In some embodiments antibody cytokine engrafted proteins comprise heavy and light chain immunoglobulin sequences having binding specificity of the immunoglobulin variable domains to a target distinct from the binding specificity of the IL2 molecule. In some embodiments the binding specificity of the immunoglobulin variable domain to its target is retained in the presence of the engrafted. In certain embodiments the retained binding specificity is to a non-human target. In other embodiments the binding specificity is to a human target having therapeutic utility in conjunction with IL2 therapy. In certain embodiments, targeting the binding specificity of the immunoglobulin conveys additional therapeutic benefit to the IL2 component. In certain embodiments the binding specificity of the immunoglobulin to its target conveys synergistic activity with IL2.

[0244] In still other embodiments, the binding specificity of the immunoglobulin is reduced by the engrafting of the IL2 molecule.

### ACE Proteins Targeting the IL6 Receptor

[0245] Provided herein are ACE proteins comprising an IL6 molecule engrafted into the complementarity determining region (CDR) of an antibody. The ACE proteins of the present disclosure show suitable properties to be used in human patients, for example, they retain activity similar to that of native or recombinant human IL6. Other activities and characteristics are also demonstrated throughout the specification. Thus, provided are ACE proteins having an improved therapeutic profile over previously known IL6 and modified IL6 therapeutic agents, and methods of use of the provided ACE proteins in cancer treatment.

[0246] Accordingly, the present disclosure provides ACE proteins that are agonists of the IL6 receptor, with selective activity profiles. Provided ACE proteins comprise an immunoglobulin heavy chain sequence and an immunoglobulin light chain sequence. Each immunoglobulin heavy chain sequence comprises a heavy chain variable region (VH) and a heavy chain constant region (CH), wherein the heavy chain constant region consists of CH1, CH2, and CH3 constant regions. Each immunoglobulin light chain sequence comprises a light chain variable region (VL) and a light chain constant region (CL). In each ACE protein an IL6 molecule is incorporated into a complementarity determining region (CDR) of the VH or VL.

[0247] In some embodiments, the ACE protein comprises IL6 molecule incorporated into a heavy chain CDR. In certain embodiments IL6 is incorporated into heavy chain complementarity determining region 1 (HCDR1). In certain embodiments IL6 is incorporated into heavy chain complementarity determining region 2 (HCDR2). In certain embodiments IL6 is incorporated into heavy chain complementarity determining region 3 (HCDR3).

[0248] In some embodiments, the ACE protein comprises IL6 incorporated into a light chain CDR. In certain embodiments IL6 is incorporated into light chain complementarity determining region 1 (LCDR1). In certain embodiments IL6 is incorporated into light chain complementarity determining region 2 (LCDR2). In certain embodiments IL6 is incorporated into light chain complementarity determining region 3 (LCDR3).

[0249] In some embodiments, the ACE comprises an IL6 sequence incorporated into a CDR, whereby the IL6 sequence is inserted into the CDR sequence. The insertion may be at or near the N-terminal region of the CDR, in the middle region of the CDR or at or near the C-terminal region of the CDR. In other embodiments, the ACE comprises IL6 incorporated into a CDR, whereby the IL6 sequence does not frameshift the CDR sequence.

[0250] In some embodiments IL6 is engrafted directly into a CDR without a peptide linker, with no additional amino acids between the CDR sequence and the IL6 sequence.

[0251] In some embodiments ACE proteins comprise immunoglobulin heavy chains of an IgG class antibody heavy chain. In certain embodiments an IgG heavy chain is any one of an IgG1, an IgG2 or an IgG4 subclass.

[0252] In some embodiments ACE proteins comprise heavy and light chain immunoglobulin sequences selected from a known, clinically utilized immunoglobulin sequence. In certain embodiments ACE proteins comprise heavy and light chain immunoglobulin sequences which are humanized sequences. In other certain embodiments ACE proteins comprise heavy and light chain immunoglobulin sequences which are human sequences.

[0253] In some embodiments ACE proteins comprise heavy and light chain immunoglobulin sequences selected from germline immunoglobulin sequences.

[0254] In some embodiments ACE proteins comprise heavy and light chain immunoglobulin sequences having binding specificity of the immunoglobulin variable domains to a target distinct from the binding specificity of the cytokine molecule. In some embodiments the binding specificity of the immunoglobulin variable domain to its target is retained by 10%, 20%, 30%, 40%, 50%, 60%, 70%, 80%, 90%, 95%, 98%, 99%, or 100%, in the presence of the engrafted cytokine. In certain embodiments the retained binding specificity is to a non-human target. In other embodiments the binding specificity is to a human target having therapeutic utility in conjunction with therapy. In certain embodiments, targeting the binding specificity of the immunoglobulin conveys additional therapeutic benefit to the cytokine component. In certain embodiments the binding specificity of the immunoglobulin to its target conveys synergistic activity with cytokine.

[0255] In still other embodiments, the binding specificity of the immunoglobulin is reduced 10%, 20%, 30%, 40%, 50%, 60%, 70%, 80%, 90%, 95%, 98%, 99%, or 100%, by the engrafting of the cytokine molecule.

[0256] In some embodiments, the ACE proteins comprise a modified immunoglobulin IgG having a modified Fc conferring modified effector function. In certain embodiments the modified Fc region comprises a mutation selected from one or more of D265A, P329A, P329G, N297A, L234A, and L235A. In particular embodiments the immunoglobulin heavy chain may comprise a mutation or combination of mutations conferring reduced effector function selected from any of D265A, P329A, P329G, N297A, D265A/P329A, D265A/N297A, L234/L235A, P329A/L234A/L235A, and P329G/L234A/L235A. In some embodiments, the Fc mutation is D265A/P329A.

[0257] In some embodiments, the ACE proteins comprise (i) a heavy chain variable region having at least 85%, 89%, 90%, 91%, 92%, 93%, 94%, 95%, 96%, 97%, 98%, 99%, or 100% amino acid sequence identity to a heavy chain variable region set forth in TABLE 2 and (ii) a light chain variable region having at least 85%, 89%, 90%, 91%, 92%, 93%, 94%, 95%, 96%, 97%, 98%, 99%, or 100% amino acid sequence identity to a light chain variable region set forth in TABLE 2. The immunoglobulin chain is an IgG class selected from IgG1, IgG2, or IgG4. In certain embodiments the immunoglobulin optionally comprises a mutation or combination of mutations conferring reduced effector function selected from any of D265A, P329A, P329G, N297A, D265A/P329A, D265A/N297A, L234/L235A, P329A/L234A/L235A, and P329G/L234A/L235A. In some embodiments, the Fc mutation is D265A/P329A.

Engineered and/or Modified ACE Proteins

[0258] In certain aspects, ACE proteins are generated by engineering a cytokine sequence into a CDR region of an immunoglobulin scaffold. Both heavy and light chain immunoglobulin chains are produced to generate final antibody engrafted proteins. ACE proteins confer preferred therapeutic activity on T cells, and the ACE proteins as compared with native or recombinant human cytokine or a cytokine fused to an Fc.

[0259] To engineer ACE proteins, cytokine sequences are inserted into a CDR loop of an immunoglobulin chain scaffold protein. Engrafted ACE proteins can be prepared using any of a variety of known immunoglobulin sequences which have been utilized in clinical settings, known immunoglobulin sequences which are in current discovery and/or clinical development, human germline antibody sequences, as well as sequences of novel antibody immunoglobulin chains. Constructs are produced using standard molecular biology methodology utilizing recombinant DNA encoding relevant sequences. Sequences of cytokines in exemplary scaffolds, referred to as GFTX3b, and GFTX are depicted in TABLE 2. Insertion points were selected to be the mid-point of the loop based on available structural or homology model data, however, insertion points can be adjusted toward one or another end of the CDR loop. In some embodiments, engrafted constructs can be prepared using an immunoglobulin scaffold that does not have binding specificity to any antigen. In some embodiments, engrafted constructs can be prepared using an immunoglobulin scaffold that does not have binding specificity to a human antigen. In some embodiments, engrafted constructs can be prepared using an immunoglobulin scoffold that has binding specificity to a human antigen, such as a tumor antigen

[0260] Thus the present disclosure provides antibodies or fragments thereof that specifically bind to cytokine receptors comprising a cytokine protein recombinantly inserted into a heterologous antibody protein or polypeptide to generate engrafted proteins. In particular, the disclosure provides engrafted proteins comprising an antibody or antigen-binding fragment of an antibody described herein or any other relevant scaffold antibody polypeptide (e.g., a full antibody immunoglobulin protein, a Fab fragment, Fc fragment, Fv fragment, F(ab)2 fragment, a VH domain, a VH CDR, a VL domain, a VL CDR, etc.) and a heterologous cytokine protein, polypeptide, or peptide. Methods for fusing or conjugating proteins, polypeptides, or peptides to an antibody or an antibody fragment are known in the art. See, e.g., U.S. Pat. Nos. 5,336,603, 5,622,929, 5,359,046, 5,349,053, 5,447,851, and 5,112,946; European Patent Nos. EP 307,434 and EP 367,166; International Publication Nos. WO 96/04388 and WO 91/06570; Ashkenazi et al., 1991, Proc. Natl. Acad. Sci. USA 88: 10535-10539; Zheng et al., 1995, J. Immunol. 154:5590-5600; and Vil et al., 1992, Proc. Natl. Acad. Sci. USA 89:11337-11341. Additionally, ACE proteins may be generated through the techniques of gene-shuffling, motif-shuffling, exon-shuffling, and/or codon-shuffling (collectively referred to as “DNA shuffling”). DNA shuffling may be employed to prepare engrafted protein constructs and/or to alter the activities of antibodies or fragments thereof (e.g., antibodies or fragments thereof with higher affinities and lower dissociation rates). See, generally, U.S. Pat. Nos. 5,605,793, 5,811,238, 5,830,721, 5,834,252, and 5,837,458; Patten et al., 1997, Curr. Opinion Biotechnol. 8:724-33; Harayama, 1998, Trends Biotechnol. 16(2):76-82; Hansson, et al., 1999, J. Mol. Biol. 287:265-76; and Lorenzo and Blasco, 1998, Biotechniques 24(2):308-313. Antibodies or fragments thereof, or the encoded antibodies or fragments thereof, may be altered by being subjected to random mutagenesis by error-prone PCR, random nucleotide insertion or other methods prior to recombination. A polynucleotide encoding an antibody or fragment thereof that specifically binds to an antigen protein of interest may be recombined with one or more components, motifs, sections, parts, domains, fragments, etc. of one or more heterologous cytokine molecules, for preparation of ACE proteins as provided herein.

[0261] An antibody Fab contains six CDR loops, 3 in the light chain (CDRL1, CDRL2, CDRL3) and 3 in the heavy chain (CDRH1, CDRH2, CDRH3) which can serve as potential insertion sites for a cytokine protein. Structural and functional considerations are taken into account in order to determine which CDR loop(s) to insert the cytokine. As a CDR loop size and conformation vary greatly across different antibodies, the optimal CDR for insertion can be determined empirically for each particular antibody/protein combination. Additionally, since a cytokine protein will be inserted into a CDR loop, this can put additional constraints on the structure of the cytokine protein.

[0262] CDRs of immunoglobulin chains are determined by well-known numbering systems known in the art, including those described herein. For example, CDRs have been identified and defined by (1) using the numbering system described in Kabat et al. (1991), “Sequences of Proteins of Immunological Interest,” 5th Ed. Public Health Service, National Institutes of Health, Bethesda, Md. (“Kabat” numbering scheme), NIH publication No. 91-3242; and (2) Chothia, see Al-Lazikani et al., (1997) “Standard conformations for the canonical structures of immunoglobulins,” J. Mol. Biol. 273:927-948. For identified CDR amino acid sequences less than 20 amino acids in length, one or two conservative amino acid residue substitutions can be tolerated while still retaining the desired specific binding and/or agonist activity.

[0263] An ACE protein further can be prepared using an antibody having one or more of the CDRs and/or V_{H} and/or V_{L} sequences shown herein (e.g., TABLE 2) as starting material to engineer a modified ACE protein, which may have altered properties from the starting antibody engrafted protein. Alternatively any known antibody sequences may be utilized as a scaffold to engineer modified ACE protein. For example, any known, clinically utilized antibody may be utilized as a starting materials scaffold for preparation of antibody engrafted protein. Known antibodies and corresponding immunoglobulin sequences include, e.g., palivizumab, alirocumab, mepolizumab, necitumumab, nivolumab, dinutuximab, secukinumab, evolocumab, blinatumomab, pembrolizumab, ramucirumab vedolizumab, siltuximab, obinutuzumab, trastuzumab, raxibacumab, pertuzumab, belimumab, ipilimumab. denosumab, tocilizumab, ofatumumab, canakinumab, golimumab, ustekinumab, certolizumab, catumaxomab, eculizumab, ranibizumab, panitumumab, natalizumab, bevacizumab, cetuximab, efalizumab, omalizumab, tositumomab, ibritumomab tiuxetan, adalimumab, alemtuzumab, gemtuzumab, infliximab, basiliximab, daclizumab, rituximab, abciximab, muromonab, or modifications thereof. Known antibodies and immunoglobulin sequences also include germline antibody sequences. Framework sequences can be obtained from public DNA databases or published references that include germline antibody gene sequences. For example, germline DNA sequences for human heavy and light chain variable region genes can be found in the “VBase” human germline sequence database, as well as in Kabat, E. A., et al., 1991 Sequences of Proteins of Immunological Interest, Fifth Edition, U.S. Department of Health and Human Services, NIH Publication No. 91-3242; Tomlinson, I. M., et al., 1992 J. fol. Biol. 227:776-798; and Cox, J. P. L. et al., 1994 Eur. J Immunol. 24:827-836. In still other examples, antibody and corresponding immunoglobulin sequences from other known entities which can be in early discovery and/or drug development can be similarly adapted as starting material to engineer a modified ACE protein.

[0264] A wide variety of antibody/immunoglobulin frameworks or scaffolds can be employed so long as the resulting polypeptide includes at least one binding region which accommodates incorporation of a cytokine. Such frameworks or scaffolds include the 5 main idiotypes of human immunoglobulins, or fragments thereof, and include immunoglobulins of other animal species, preferably having humanized and/or human aspects. Novel antibodies, frameworks, scaffolds and fragments continue to be discovered and developed by those skilled in the art.

[0265] Antibodies can be generated using methods that are known in the art. For preparation of monoclonal antibodies, any technique known in the art can be used (see, e.g., Kohler & Milstein, Nature 256:495-497 (1975); Kozbor et al., Immunology Today 4:72 (1983); Cole et al., Monoclonal Antibodies and Cancer Therapy, pp. 77-96. Alan R. Liss, Inc. 1985). Techniques for the production of single chain antibodies (U.S. Pat. No. 4,946,778) can be adapted to produce antibodies for use in ACE proteins. Also, transgenic mice, or other organisms such as other mammals, may be used to express and identify primatized or humanized or human antibodies. Alternatively, phage display technology can be used to identify antibodies and heteromeric Fab fragments that specifically bind to selected antigens for use in ACE proteins (see, e.g., McCafferty et al., supra; Marks et al., Biotechnology, 10:779-783, (1992)).

[0266] Methods for primatizing or humanizing non-human antibodies are well known in the art. Generally, a primatized or humanized antibody has one or more amino acid residues introduced into it from a source which is non-primate or non-human Such non-primate or non-human amino acid residues are often referred to as import residues, which are typically taken from an import variable domain Humanization can be essentially performed following the method of Winter and co-workers (see, e.g., Jones et al., Nature 321:522-525 (1986); Riechmann et al., Nature 332:323-327 (1988); Verhoeyen et al., Science 239:1534-1536 (1988) and Presta, Curr. Op. Struct. Biol. 2:593-596 (1992)), by substituting rodent CDRs or CDR sequences for the corresponding sequences of a human antibody. Accordingly, such humanized antibodies are chimeric antibodies (U.S. Pat. No. 4,816,567), wherein substantially less than an intact human variable domain has been substituted by the corresponding sequence from a non-human species. In practice, primatized or humanized antibodies are typically primate or human antibodies in which some complementary determining region (“CDR”) residues and possibly some framework (“FR”) residues are substituted by residues from analogous sites in an originating species (e.g., rodent antibodies) to confer binding specificity.

[0267] Alternatively or additionally, an in vivo method for replacing a nonhuman antibody variable region with a human variable region in an antibody while maintaining the same or providing better binding characteristics relative to that of the nonhuman antibody may be utilized to convert non-human antibodies into engineered human antibodies. See, e.g., U.S. Patent Publication No. 20050008625, U.S. Patent Publication No. 2005/0255552. Alternatively, human V segment libraries can be generated by sequential cassette replacement in which only part of the reference antibody V segment is initially replaced by a library of human sequences; and identified human “cassettes” supporting binding in the context of residual reference antibody amino acid sequences are then recombined in a second library screen to generate completely human V segments (see, U.S. Patent Publication No. 2006/0134098).

[0268] Various antibodies or antigen-binding fragments for use in preparation of ACE proteins can be produced by enzymatic or chemical modification of the intact antibodies, or synthesized de novo using recombinant DNA methodologies (e.g., single chain Fv), or identified using phage display libraries (see, e.g., McCafferty et al., Nature 348:552-554, 1990). For example, minibodies can be generated using methods described in the art, e.g., Vaughan and Sollazzo, Comb. Chem. High Throughput Screen 4:417-30 2001. Bispecific antibodies can be produced by a variety of methods including engrafted of hybridomas or linking of Fab′ fragments. See, e.g., Songsivilai & Lachmann, Clin. Exp. Immunol. 79:315-321 (1990); Kostelny et al., J. Immunol. 148, 1547-1553 (1992). Single chain antibodies can be identified using phage display libraries or ribosome display libraries, gene shuffled libraries. Such libraries can be constructed from synthetic, semi-synthetic or native and immunocompetent sources. Selected immunoglobulin sequences may thus be utilized in preparation of ACE protein constructs as provided herein.

[0269] Antibodies, antigen-binding molecules or ACE molecules of use in the present disclosure further include bispecific antibodies. A bispecific or bifunctional antibody is an artificial hybrid antibody having two different heavy/light chain pairs and two different binding sites. Other antigen-binding fragments or antibody portions include bivalent scFv (diabody), bispecific scFv antibodies where the antibody molecule recognizes two different epitopes, single binding domains (dAbs), and minibodies. Selected immunoglobulin sequences may thus be utilized in preparation of ACE protein constructs as provided herein.

[0270] Antigen-binding fragments of antibodies e.g., a Fab fragment, scFv, can be used as building blocks to construct ACE proteins, and may optionally include multivalent formats. In some embodiments, such multivalent molecules comprise a constant region of an antibody (e.g., Fc).

[0271] ACE proteins can be engineered by modifying one or more residues within one or both variable regions (i.e., VH and/or VL) of an antibody, for example, within one or more CDR regions, and such adapted VH and/or VL region sequences are utilized for engrafting a cytokine or for preparation of cytokine engrafting. Antibodies interact with target antigens predominantly through amino acid residues that are located in the six heavy and light chain complementarity determining regions (CDRs). For this reason, the amino acid sequences within CDRs are more diverse between individual antibodies than sequences outside of CDRs. CDR sequences are responsible for most antibody-antigen interactions, it is possible to express recombinant antibodies that mimic the properties of a specific antibody by constructing expression vectors that include CDR sequences from a specific antibody grafted onto framework sequences from a different antibody with different properties (see, e.g., Riechmann, L. et al., 1998 Nature 332:323-327; Jones, P. et al., 1986 Nature 321:522-525; Queen, C. et al., 1989 Proc. Natl. Acad., U.S.A. 86:10029-10033; U.S. Pat. No. 5,225,539 to Winter, and U.S. Pat. Nos. 5,530,101; 5,585,089; 5,693,762 and 6,180,370 to Queen et al.). In certain instances it is beneficial to mutate residues within the framework regions to maintain or enhance the antigen binding ability of the antibody (see e.g., U.S. Pat. Nos. 5,530,101; 5,585,089; 5,693,762 and 6,180,370 to Queen et al).

[0272] In some aspects mutation of amino acid residues within the VH and/or VL CDR1, CDR2, and/or CDR3 regions to thereby improve one or more binding properties (e.g., affinity) of the antibody of interest, known as “affinity maturation,” may be beneficial, e.g., to optimize antigen binding of an antibody in conjunction with the context of the cytokine engrafted protein. Site-directed mutagenesis or PCR-mediated mutagenesis can be performed to introduce the mutation(s) and the effect on antibody binding, or other functional property of interest, can be evaluated in in vitro or in vivo assays as described herein and/or alternative or additional assays known in the art. Conservative modifications can be introduced. The mutations may be amino acid substitutions, additions or deletions. Moreover, typically no more than one, two, three, four or five residues within a CDR region are altered.

[0273] Engineered antibodies or antibody fragments include those in which modifications have been made to framework residues within VH and/or VL, e.g. to improve the properties of the antibody. In some embodiments such framework modifications are made to decrease immunogenicity of the antibody. For example, one approach is to change one or more framework residues to the corresponding germline sequence. More specifically, an antibody that has undergone somatic mutation may contain framework residues that differ from germline sequence from which the antibody is derived. Such residues can be identified by comparing the antibody framework sequences to the germline sequences from which the antibody is derived. To return the framework region sequences to their germline configuration, the somatic mutations can be “backmutated” to the germline sequence by, for example, site-directed mutagenesis. Additional framework modification involves mutating one or more residues within the framework region, or even within one or more CDR regions, to remove T cell epitopes to thereby reduce the potential immunogenicity of the antibody. This approach is also referred to as “deimmunization” and is described in further detail in U.S. Patent Publication No. 20030153043 by Carr et al.

[0274] Constant regions of the antibodies or antibody fragments utilized for preparation of the ACE protein can be any type or subtype, as appropriate, and can be selected to be from the species of the subject to be treated by the present methods (e.g., human, non-human primate or other mammal, for example, agricultural mammal (e.g., equine, ovine, bovine, porcine, camelid), domestic mammal (e.g., canine, feline) or rodent (e.g., rat, mouse, hamster, rabbit). In some embodiments antibodies utilized in ACE proteins are engineered to generate humanized or Humaneered® antibodies. In some embodiments antibodies utilized in ACE proteins are human antibodies. In some embodiments, antibody constant region isotype is IgG, for example, IgG1, IgG2, IgG3, IgG4. In certain embodiments the constant region isotype is IgG1. In some embodiments, ACE proteins comprise an IgG. In some embodiments, ACE proteins comprise an IgG1 Fc. In some embodiments, ACE proteins comprise an IgG2 Fc.

[0275] In addition or alternative to modifications made within framework or CDR regions, antibodies or antibody fragments utilized in preparation of ACE proteins may be engineered to include modifications within an Fc region, typically to alter one or more functional properties of the antibody, such as, e.g., serum half-life, complement fixation, Fc receptor binding, and/or antigen-dependent cellular cytotoxicity. Furthermore, an antibody, antibody fragment thereof, or ACE protein can be chemically modified (e.g., one or more chemical moieties can be attached to the antibody) or be modified to alter its glycosylation, again to alter one or more functional properties of the ACE protein.

[0276] In one embodiment, a hinge region of CH1 is modified such that the number of cysteine residues in the hinge region is altered, e.g., increased or decreased. For example, by the approach is described further in U.S. Pat. No. 5,677,425 by Bodmer et al. wherein the number of cysteine residues in the hinge region of CH1 is altered to, for example, facilitate assembly of the light and heavy chains or to increase or decrease the stability of the ACE protein. In another embodiment, an Fc hinge region of an antibody is mutated to alter the biological half-life of the ACE protein. More specifically, one or more amino acid mutations are introduced into the CH2-CH3 domain interface region of the Fc-hinge fragment such that the ACE protein has impaired Staphylococcyl protein A (SpA) binding relative to native Fc-hinge domain SpA binding. This approach is described in further detail in U.S. Pat. No. 6,165,745 by Ward et al.

[0277] The present disclosure provides for ACE proteins that specifically bind to a cytokine receptor which have an extended half-life in vivo. In another embodiment, an ACE protein is modified to increase its biological half-life. Various approaches are possible. ACE proteins having an increased half-life in vivo can also be generated introducing one or more amino acid modifications (i.e., substitutions, insertions or deletions) into an IgG constant domain, or FcRn binding fragment thereof (preferably a Fc or hinge Fc domain fragment). For example, one or more of the following mutations can be introduced: T252L, T254S, T256F, as described in U.S. Pat. No. 6,277,375 to Ward. See, e.g., International Publication No. WO 98/23289; International Publication No. WO 97/34631; and U.S. Pat. No. 6,277,375. Alternatively, to increase the biological half-life, the ACE protein is altered within the CH1 or CL region to contain a salvage receptor binding epitope taken from two loops of a CH2 domain of an Fc region of an IgG, as described in U.S. Pat. Nos. 5,869,046 and 6,121,022 by Presta et al. In yet other embodiments, the Fc region is altered by replacing at least one amino acid residue with a different amino acid residue to alter the effector functions of the ACE protein. For example, one or more amino acids can be replaced with a different amino acid residue such that the ACE protein has an altered affinity for an effector ligand but retains antigen-binding ability of the parent antibody. The effector ligand to which affinity is altered can be, for example, an Fc receptor (FcR) or the C1 component of complement. This approach is described in further detail in U.S. Pat. Nos. 5,624,821 and 5,648,260, both by Winter et al.

[0278] In another embodiment, one or more amino acids selected from amino acid residues can be replaced with a different amino acid residue such that the ACE protein has altered C1q binding and/or reduced or abolished complement dependent cytotoxicity (CDC). This approach is described in further detail in U.S. Pat. No. 6,194,551 by Idusogie et al.

[0279] ACE proteins containing such mutations mediate reduced or no antibody-dependent cellular cytotoxicity (ADCC) or complement-dependent cytotoxicity (CDC). In some embodiments, amino acid residues L234 and L235 of the IgG1 constant region are substituted to Ala234 and Ala235. In some embodiments, amino acid residue N267 of the IgG1 constant region is substituted to Ala267.

[0280] In another embodiment, one or more amino acid residues are altered to thereby alter the ability of the ACE protein to fix complement. This approach is described further in PCT Publication WO 94/29351 by Bodmer et al.

[0281] In yet another embodiment, an Fc region is modified to increase the ability of the antibody to mediate antibody dependent cellular cytotoxicity (ADCC) and/or to increase the affinity of the ACE protein for an Fcγ receptor by modifying one or more amino acids. This approach is described further in PCT Publication WO 00/42072 by Presta. Moreover, binding sites on human IgG1 for FcγR1, FcγRII, FcγRIII and FcRn have been mapped and variants with improved binding have been described (see Shields, R. L. et al., 2001 J. Biol. Chem. 276:6591-6604).

[0282] In still another embodiment, glycosylation of an ACE protein is modified. For example, an aglycoslated ACE protein can be made (i.e., the ACE protein lacks glycosylation). Glycosylation can be altered to, for example, increase the affinity of the antibody for “antigen.” Such carbohydrate modifications can be accomplished by, for example, altering one or more sites of glycosylation within the antibody sequence. For example, one or more amino acid substitutions can be made that result in elimination of one or more variable region framework glycosylation sites to thereby eliminate glycosylation at that site. Such aglycosylation may increase the affinity of the antibody for antigen. Such an approach is described in further detail in U.S. Pat. Nos. 5,714,350 and 6,350,861 by Co et al.

[0283] Additionally or alternatively, an ACE protein can be made that has an altered type of glycosylation, such as a hypofucosylated ACE protein having reduced amounts of fucosyl residues or an antibody having increased bisecting GlcNac structures. Such altered glycosylation patterns have been demonstrated to increase the antibody dependent cellular cytotoxicity (ADCC) ability of antibodies. Such carbohydrate modifications can be accomplished by, for example, expressing the ACE protein in a host cell with altered glycosylation machinery. Cells with altered glycosylation machinery have been described in the art and can be used as host cells in which to express recombinant ACE proteins to thereby produce an ACE protein with altered glycosylation. For example, EP 1,176,195 by Hang et al. describes a cell line with a functionally disrupted FUT8 gene, which encodes a fucosyl transferase, such that ACE proteins expressed in such a cell line exhibit hypofucosylation. PCT Publication WO 03/035835 by Presta describes a variant CHO cell line, Lecl3 cells, with reduced ability to attach fucose to Asn(297)-linked carbohydrates, also resulting in hypofucosylation of ACE proteins expressed in that host cell (see also Shields, R. L. et al., 2002 J. Biol. Chem. 277:26733-26740). PCT Publication WO 99/54342 by Umana et al. describes cell lines engineered to express glycoprotein-modifying glycosyl transferases (e.g., beta(1,4)-N acetylglucosaminyltransferase III (GnTIII)) such that ACE proteins expressed in the engineered cell lines exhibit increased bisecting GlcNac structures which results in increased ADCC activity of the antibodies (see also Umana et al., 1999 Nat. Biotech. 17:176-180).

[0284] In some embodiments, one or more domains, or regions, of an ACE protein are connected via a linker, for example, a peptide linker, such as those that are well known in the art (see e.g., Holliger, P., et al. (1993) Proc. Natl. Acad. Sci. USA 90:6444-6448; Poljak, R J., et al. (1994) Structure 2:1121-1123). A peptide linker may vary in length, e.g., a linker can be 1-100 amino acids in length, typically a linker is from five to 50 amino acids in length, e.g., 5, 6, 7, 8, 9, 10, 11, 12, 13, 14, 15, 16, 17, 18, 19, 20, 21, 22, 23, 24, 25, 26, 27, 28, 29, 30, 31, 32, 33, 34, 35, 36, 37, 38, 39, 40, 41, 42, 43, 44, 45, 46, 47, 48, 49, or 50 amino acids in length.

[0285] In some embodiments the cytokine is engrafted into the CDR sequence optionally with one or more peptide linker sequences. In certain embodiments one or more peptide linkers is independently selected from a (Glyₙ-Ser)ₘ sequence (SEQ ID NO: 3974), a (Glyₙ-Ala)ₘ sequence (SEQ ID NO: 3975), or any combination of a (Glyₙ-Ser)ₘ/(Glyₙ-Ala)ₘ sequence (SEQ ID NOS 3974-3975), wherein each n is independently an integer from 1 to 5 and each m is independently an integer from 0 to 10. Examples of linkers include, but are not limited to, glycine-based linkers or gly/ser linkers G/S such as (GₘS)ₙ wherein n is a positive integer equal to 1, 2, 3, 4, 5, 6, 7, 8, 9, or 10 and m is an integer equal to 0, 1, 2, 3, 4, 5, 6, 7, 8, 9, or 10 (SEQ ID NO: 3976). In certain embodiments one or more linkers include G₄S (SEQ ID NO: 3972) repeats, e.g., the Gly-Ser linker (G₄S)ₙ wherein n is a positive integer equal to or greater than 1 (SEQ ID NO: 3972). For example, n=1, n=2, n=3. n=4, n=5 and n=6, n=7, n=8, n=9 and n=10. In some embodiments, Ser can be replaced with Ala e.g., linkers G/A such as (GₘA)ₙ wherein n is a positive integer equal to 1, 2, 3, 4, 5, 6, 7, 8, 9, or 10 and m is an integer equal to 0, 1, 2, 3, 4, 5, 6, 7, 8, 9, or 10 (SEQ ID NO: 3977). In certain embodiments one or more linkers include G₄A (SEQ ID NO: 3973) repeats, (G₄A)ₙ wherein n is a positive integer equal to or greater than 1 (SEQ ID NO: 3973). For example, n=1, n=2, n=3. n=4, n=5 and n=6, n=7, n=8, n=9 and n=10. In some embodiments, the linker includes multiple repeats of linkers. In other embodiments, a linker includes combinations and multiples of G₄S (SEQ ID NO: 3972) and G₄A (SEQ ID NO: 3973).

[0286] Other examples of linkers include those based on flexible linker sequences that occur naturally in antibodies to minimize immunogenicity arising from linkers and junctions. For example, there is a natural flexible linkage between the variable domain and a CH1 constant domain in antibody molecular structure. This natural linkage comprises approximately 10-12 amino acid residues, contributed by 4-6 residues from C-terminus of V domain and 4-6 residues from the N-terminus of the CH1 domain. ACE proteins can, e.g., employ linkers incorporating terminal 5-6 amino acid residues, or 11-12 amino acid residues, of CH1 as a linker. The N-terminal residues of the CH1 domain, particularly the first 5-6 amino acid residues, adopt a loop conformation without strong secondary structure, and, therefore, can act as a flexible linker. The N-terminal residues of the CH1 domain are a natural extension of the variable domains, as they are part of the Ig sequences, and, therefore, minimize to a large extent any immunogenicity potentially arising from the linkers and junctions. In some embodiments a linker sequence includes a modified peptide sequence based on a hinge sequence.

[0287] Moreover, the ACE proteins can include marker sequences, such as a peptide to facilitate purification of ACE proteins. In preferred embodiments, a marker amino acid sequence is a hexa-histidine (SEQ ID NO: 3978) peptide, such as the tag provided in a pQE vector (QIAGEN, Inc., 9259 Eton Avenue, Chatsworth, Calif., 91311), among others, many of which are commercially available. As described in Gentz et al., 1989, Proc. Natl. Acad. Sci. USA 86:821-824, for instance, hexa-histidine (SEQ ID NO: 3978) provides for convenient purification of the engrafted protein. Other peptide tags useful for purification include, but are not limited to, the hemagglutinin (“HA”) tag, which corresponds to an epitope derived from the influenza hemagglutinin protein (Wilson et al., 1984, Cell 37:767), and the “flag” tag.

[0288] Antibodies may also be attached to solid supports, which are particularly useful for immunoassays or purification of the target antigen. Such solid supports include, but are not limited to, glass, cellulose, polyacrylamide, nylon, polystyrene, polyvinyl chloride or polypropylene.

### Assays for ACE Protein Activity

[0289] Assays for identifying ACE proteins are known in the art and described herein. Agonist ACE proteins bind to their cognate cytokine receptor and promote, induce, stimulate intracellular signaling resulting in intracellular signaling as well as other biological effects.

[0290] Binding of the ACE proteins to their receptor can be determined using any method known in the art. For example, binding to the receptor can be determined using known techniques, including without limitation ELISA, Western blots, surface plasmon resonance (SPR) (e.g., BIAcore), and flow cytometry.

[0291] Intracellular signaling through the cytokine receptor can be measured using any method known in the art. For example, activation of the IL7Ra by IL7 promotes STAT5 activation and signaling. Methods for measuring STAT5 activation are standard in the art (e.g., phosphorylation status of STAT5 protein, reporter gene assays, downstream signaling assays, etc.). As another example, activation through the IL7Ra expands T cells, so the absolute numbers of T cells can be assayed for. In addition, either CD8+ or CD4+ T cells can be assayed for independently. Methods for measuring proliferation of cells are standard in the art (e.g., ³H-thymidine incorporation assays, CFSE labelling). Methods for measuring cytokine production are well known in the art (e.g., ELISA assays, ELISpot assays). In performing in vitro assays, test cells or culture supernatant from test cells contacted with ACE proteins can be compared to control cells or culture supernatants from control cells that have not been contacted with an ACE protein and/or those that have been contacted with recombinant human cytokine or an cytokine-Fc fusion molecule.

[0292] The activity of the ACE proteins can also be measured ex vivo and/or in vivo. In some aspects, methods for measuring receptor activation across various cell types ex vivo from animals treated with ACE proteins as compared to untreated control animals and/or animals similarly treated with native cytokine may be used to show differential activity of the ACE proteins across cell types. Preferred agonist ACE proteins have the ability to induce intracellular signaling. The efficacy of the ACE proteins can be determined by administering a therapeutically effective amount of the ACE protein to a subject and comparing the subject before and after administration of the ACE protein. Efficacy of the ACE proteins can also be determined by administering a therapeutically effective amount of an ACE protein to a test subject and comparing the test subject to a control subject who has not been administered the antibody and/or comparison to a subject similarly treated with the native cytokine.

### Polynucleotides Encoding ACE Proteins

[0293] In another aspect, isolated nucleic acids encoding heavy and light chain proteins of the ACE proteins are provided. ACE proteins can be produced by any means known in the art, including but not limited to, recombinant expression, chemical synthesis, and enzymatic digestion of antibody tetramers. Recombinant expression can be from any appropriate host cells known in the art, for example, mammalian host cells, bacterial host cells, yeast host cells, insect host cells, etc.

[0294] Provided herein are polynucleotides that encode the variable regions exemplified in TABLE 2. In some embodiments, the polynucleotide encoding the heavy chain variable regions comprises a sequence having at least 85%, 89%, 90%, 91%, 92%, 93%, 94%, 95%, 96%, 97%, 98%, 99%, or 100% nucleic acid sequence identity with a polynucleotide encoding a variable heavy chain or a variable light chain as set forth in TABLE 2.

[0295] Polynucleotides can encode only the variable region sequence of an ACE protein. They can also encode both a variable region and a constant region of the ACE protein. Some of the polynucleotide sequences encode a polypeptide that comprises variable regions of both the heavy chain and the light chain of one of the ACE proteins. Some other polynucleotides encode two polypeptide segments that respectively are substantially identical to the variable regions of the heavy chain and the light chain of one of the ACE proteins.

[0296] In certain embodiments polynucleotides or nucleic acids comprise DNA. In other embodiments polynucleotides or nucleic acids comprise RNA, which may be single stranded or double stranded.

[0297] In some embodiments a recombinant host cell comprising the nucleic acids encoding one or more immunoglobulin protein chain of an ACE protein, and optionally, secretion signals are provided. In certain embodiments a recombinant host cell comprises a vector encoding one immunoglobulin protein chain and secretion signals. In other certain embodiments a recombinant host cell comprises one or more vectors encoding two immunoglobulin protein chains of the ACE protein and secretion signals. In some embodiments a recombinant host cell comprises a single vector encoding two immunoglobulin protein chains of the ACE protein and secretion signals. In some embodiments a recombinant host cell comprises two vectors, one encoding a heavy chain immunoglobulin protein chain, and another encoding a light chain immunoglobulin protein chain of the ACE protein, with each including secretion signals. A recombinant host cell may be a prokaryotic or eukaryotic cell. In some embodiments a host cell is a eukaryotic cell line. In some embodiments a host cell is a mammalian cell line.

[0298] Additionally provided are methods for producing the ACE proteins. In some embodiments the method comprises the steps of (i) culturing a host cell comprising one or more vectors encoding immunoglobulin protein chains of an ACE protein under conditions suitable for expression, formation, and secretion of the ACE protein and (ii) recovering the ACE protein.

[0299] The polynucleotide sequences can be produced by de novo solid-phase DNA synthesis or by PCR mutagenesis of an existing sequence (e.g., sequences as described herein) encoding a polypeptide chain of an ACE protein. Direct chemical synthesis of nucleic acids can be accomplished by methods known in the art, such as the phosphotriester method of Narang et al., Meth. Enzymol. 68:90, 1979; the phosphodiester method of Brown et al., Meth. Enzymol. 68:109, 1979; the diethylphosphoramidite method of Beaucage et al., Tetra. Lett., 22:1859, 1981; and the solid support method of U.S. Pat. No. 4,458,066. Introducing mutations to a polynucleotide sequence by PCR can be performed as described in, e.g., PCR Technology: Principles and Applications for DNA Amplification, H. A. Erlich (Ed.), Freeman Press, NY, NY, 1992; PCR Protocols: A Guide to Methods and Applications, Innis et al. (Ed.), Academic Press, San Diego, Calif., 1990; Mattila et al., Nucleic Acids Res. 19:967, 1991; and Eckert et al., PCR Methods and Applications 1:17, 1991.

[0300] Also provided in the disclosure are expression vectors and host cells for producing the ACE proteins described above. Various expression vectors can be employed to express polynucleotides encoding the immunoglobulin polypeptide chains, or fragments, of the ACE proteins. Both viral-based and nonviral expression vectors can be used to produce the immunoglobulin proteins in a mammalian host cell. Nonviral vectors and systems include plasmids, episomal vectors, typically with an expression cassette for expressing a protein or RNA, and human artificial chromosomes (see, e.g., Harrington et al., Nat. Genet. 15:345, 1997). For example, nonviral vectors useful for expression of the ACE protein polynucleotides and polypeptides in mammalian (e.g., human) cells include pThioHis A, B & C, pcDNA3.1/His, pEBVHis A, B & C (Invitrogen, San Diego, Calif.), MPSV vectors, and numerous other vectors known in the art for expressing other proteins. Useful viral vectors include vectors based on retroviruses, adenoviruses, adeno-associated viruses, herpes viruses, vectors based on SV40, papilloma virus, HBP Epstein Barr virus, vaccinia virus vectors and Semliki Forest virus (SFV). See, Brent et al., supra; Smith, Annu. Rev. Microbiol. 49:807, 1995; and Rosenfeld et al., Cell 68:143, 1992.

[0301] The choice of expression vector depends on the intended host cells in which the vector is to be expressed. Typically, the expression vectors contain a promoter and other regulatory sequences (e.g., enhancers) that are operably linked to the polynucleotides encoding an immunoglobulin protein of the ACE protein. In some embodiments, an inducible promoter is employed to prevent expression of inserted sequences except under inducing conditions. Inducible promoters include, e.g., arabinose, lacZ, metallothionein promoter or a heat shock promoter. Cultures of transformed organisms can be expanded under noninducing conditions without biasing the population for coding sequences whose expression products are better tolerated by the host cells. In addition to promoters, other regulatory elements may also be required or desired for efficient expression of an immunoglobulin chain or fragment of the ACE proteins. These elements typically include an ATG initiation codon and adjacent ribosome binding site or other sequences. In addition, the efficiency of expression may be enhanced by the inclusion of enhancers appropriate to the cell system in use (see, e.g., Scharf et al., Results Probl. Cell Differ. 20:125, 1994; and Bittner et al., Meth. Enzymol., 153:516, 1987). For example, the SV40 enhancer or CMV enhancer may be used to increase expression in mammalian host cells.

[0302] Expression vectors may also provide a secretion signal sequence position to form an ACE protein that exported out of the cell and into the culture medium. In certain aspects, the inserted immunoglobulin sequences of the ACE proteins are linked to a signal sequences before inclusion in the vector. Vectors to be used to receive sequences encoding immunoglobulin light and heavy chain variable domains sometimes also encode constant regions or parts thereof. Such vectors allow expression of the variable regions as engrafted proteins with the constant regions thereby leading to production of intact ACE proteins or fragments thereof. Typically, such constant regions are human.

[0303] Host cells for harboring and expressing the ACE protein chains can be either prokaryotic or eukaryotic. E. coli is one prokaryotic host useful for cloning and expressing the polynucleotides of the present disclosure. Other microbial hosts suitable for use include bacilli, such as Bacillus subtilis, and other enterobacteriaceae, such as Salmonella, Serratia, and various Pseudomonas species. In these prokaryotic hosts, one can also make expression vectors, which typically contain expression control sequences compatible with the host cell (e.g., an origin of replication). In addition, any number of a variety of well-known promoters will be present, such as the lactose promoter system, a tryptophan (trp) promoter system, a beta-lactamase promoter system, or a promoter system from phage lambda. The promoters typically control expression, optionally with an operator sequence, and have ribosome binding site sequences and the like, for initiating and completing transcription and translation. Other microbes, such as yeast, can also be employed to express ACE protein polypeptides. Insect cells in combination with baculovirus vectors can also be used.

[0304] In some preferred embodiments, mammalian host cells are used to express and produce the ACE protein polypeptides. For example, they can be either a mammalian cell line containing an exogenous expression vector. These include any normal mortal or normal or abnormal immortal animal or human cell. For example, a number of suitable host cell lines capable of secreting intact immunoglobulins have been developed, including the CHO cell lines, various Cos cell lines, HeLa cells, myeloma cell lines, transformed B-cells and hybridomas. The use of mammalian tissue cell culture to express polypeptides is discussed generally in, e.g., Winnacker, From Genes to Clones, VCH Publishers, N.Y., N.Y., 1987. Expression vectors for mammalian host cells can include expression control sequences, such as an origin of replication, a promoter, and an enhancer (see, e.g., Queen et al., Immunol. Rev. 89:49-68, 1986), and necessary processing information sites, such as ribosome binding sites, RNA splice sites, polyadenylation sites, and transcriptional terminator sequences. These expression vectors usually contain promoters derived from mammalian genes or from mammalian viruses. Suitable promoters may be constitutive, cell type-specific, stage-specific, and/or modulatable or regulatable. Useful promoters include, but are not limited to, the metallothionein promoter, the constitutive adenovirus major late promoter, the dexamethasone-inducible MMTV promoter, the SV40 promoter, the MRP polIII promoter, the constitutive MPSV promoter, the tetracycline-inducible CMV promoter (such as the human immediate-early CMV promoter), the constitutive CMV promoter, and promoter-enhancer combinations known in the art.

[0305] Methods for introducing expression vectors containing the polynucleotide sequences of interest vary depending on the type of cellular host. For example, calcium chloride transfection is commonly utilized for prokaryotic cells, whereas calcium phosphate treatment or electroporation may be used for other cellular hosts (see generally Sambrook et al., supra). Other methods include, e.g., electroporation, calcium phosphate treatment, liposome-mediated transformation, injection and microinjection, ballistic methods, virosomes, immunoliposomes, polycation:nucleic acid conjugates, naked DNA, artificial virions, engrafted to the herpes virus structural protein VP22 (Elliot and O'Hare, Cell 88:223, 1997), agent-enhanced uptake of DNA, and ex vivo transduction. For long-term, high-yield production of recombinant proteins, stable expression will often be desired. For example, cell lines which stably express ACE protein immunoglobulin chains can be prepared using expression vectors which contain viral origins of replication or endogenous expression elements and a selectable marker gene. Following introduction of the vector, cells may be allowed to grow for 1-2 days in an enriched media before they are switched to selective media. The purpose of the selectable marker is to confer resistance to selection, and its presence allows growth of cells which successfully express the introduced sequences in selective media. Resistant, stably transfected cells can be proliferated using tissue culture techniques appropriate to the cell type.

### Pharmaceutical Compositions Comprising ACE Proteins

[0306] Provided are pharmaceutical compositions comprising an ACE protein formulated together with a pharmaceutically acceptable carrier. Optionally, pharmaceutical compositions additionally contain other therapeutic agents that are suitable for treating or preventing a given disorder. Pharmaceutically acceptable carriers enhance or stabilize the composition, or facilitate preparation of the composition. Pharmaceutically acceptable carriers include solvents, dispersion media, coatings, antibacterial and antifungal agents, isotonic and absorption delaying agents, and the like that are physiologically compatible.

[0307] A pharmaceutical composition of the present disclosure can be administered by a variety of methods known in the art. Route and/or mode of administration vary depending upon the desired results. It is preferred that administration be by parenteral administration (e.g., selected from any of intravenous, intramuscular, intraperitoneal, intrathecal, intraarterial, or subcutaneous), or administered proximal to the site of the target. A pharmaceutically acceptable carrier is suitable for administration by any one or more of intravenous, intramuscular, intraperitoneal, intrathecal, intraarterial, subcutaneous, intranasal, inhalational, spinal or epidermal administration (e.g., by injection). Depending on the route of administration, active compound, e.g., ACE protein, may be coated in a material to protect the compound from the action of acids and other natural conditions that may inactivate the compound. In some embodiments the pharmaceutical composition is formulated for intravenous administration. In some embodiments the pharmaceutical composition is formulation for subcutaneous administration.

[0308] An ACE protein, alone or in combination with other suitable components, can be made into aerosol formulations (i.e., they can be “nebulized”) to be administered via inhalation. Aerosol formulations can be placed into pressurized acceptable propellants, such as dichlorodifluoromethane, propane, nitrogen, and the like.

[0309] In some embodiments, a pharmaceutical composition is sterile and fluid. Proper fluidity can be maintained, for example, by use of coating such as lecithin, by maintenance of required particle size in the case of dispersion and by use of surfactants. In many cases, it is preferable to include isotonic agents, for example, sugars, polyalcohols such as mannitol or sorbitol, and sodium chloride in the composition. Long-term absorption of the injectable compositions can be brought about by including in the composition an agent which delays absorption, for example, aluminum monostearate or gelatin. In certain embodiments compositions can be prepared for storage in a lyophilized form using appropriate excipients (e.g., sucrose).

[0310] Pharmaceutical compositions can be prepared in accordance with methods well known and routinely practiced in the art. Pharmaceutically acceptable carriers are determined in part by the particular composition being administered, as well as by the particular method used to administer the composition. Accordingly, there is a wide variety of suitable formulations of pharmaceutical compositions. Applicable methods for formulating an ACE protein and determining appropriate dosing and scheduling can be found, for example, in Remington: The Science and Practice of Pharmacy, 21st Ed., University of the Sciences in Philadelphia, Eds., Lippincott Williams & Wilkins (2005); and in Martindale: The Complete Drug Reference, Sweetman, 2005, London: Pharmaceutical Press., and in Martindale, Martindale: The Extra Pharmacopoeia, 31st Edition., 1996, Amer Pharmaceutical Assn, and Sustained and Controlled Release Drug Delivery Systems, J. R. Robinson, ed., Marcel Dekker, Inc., New York, 1978. Pharmaceutical compositions are preferably manufactured under GMP conditions. Typically, a therapeutically effective dose or efficacious dose of an ACE protein is employed in the pharmaceutical compositions. An ACE protein is formulated into pharmaceutically acceptable dosage form by conventional methods known to those of skill in the art. Dosage regimens are adjusted to provide the desired response (e.g., a therapeutic response). In determining a therapeutically or prophylactically effective dose, a low dose can be administered and then incrementally increased until a desired response is achieved with minimal or no undesired side effects. For example, a single bolus may be administered, several divided doses may be administered over time or the dose may be proportionally reduced or increased as indicated by the exigencies of the therapeutic situation. It is especially advantageous to formulate parenteral compositions in dosage unit form for ease of administration and uniformity of dosage. Dosage unit form as used herein refers to physically discrete units suited as unitary dosages for the subjects to be treated; each unit contains a predetermined quantity of active compound calculated to produce the desired therapeutic effect in association with the required pharmaceutical carrier.

[0311] Actual dosage levels of active ingredients in the pharmaceutical compositions can be varied so as to obtain an amount of the active ingredient which is effective to achieve the desired therapeutic response for a particular patient, composition, and mode of administration, without being toxic to the patient. The selected dosage level depends upon a variety of pharmacokinetic factors including the activity of the particular compositions employed, or the ester, salt or amide thereof, the route of administration, the time of administration, the rate of excretion of the particular compound being employed, the duration of the treatment, other drugs, compounds and/or materials used in combination with the particular compositions employed, the age, sex, weight, condition, general health and prior medical history of the patient being treated, and like factors.

### Articles of Manufacture/Kits

[0312] In some aspects an ACE protein is provided in an article of manufacture (i.e., a kit). A provided ACE protein is generally in a vial or a container. Thus, an article of manufacture comprises a container and a label or package insert, on or associated with the container. Suitable containers include, for example, a bottle, vial, syringe, solution bag, etc. As appropriate, the ACE protein can be in liquid or dried (e.g., lyophilized) form. The container holds a composition which, by itself or combined with another composition, is effective for preparing a composition for treating, preventing and/or ameliorating cancer. The label or package insert indicates the composition is used for treating, preventing and/or ameliorating cancer. Articles of manufacture (kits) comprising an ACE protein, as described herein, optionally contain one or more additional agent. In some embodiments, an article of manufacture (kit) contains ACE protein and a pharmaceutically acceptable diluent. In some embodiments an ACE protein is provided in an article of manufacture (kit) with one or more additional active agent in the same formulation (e.g., as mixtures). In some embodiments an ACE protein is provided in an article of manufacture (kit) with a second or third agent in separate formulations (e.g., in separate containers). In certain embodiments an article of manufacture (kit) contains aliquots of the ACE protein wherein the aliquot provides for one or more doses. In some embodiments aliquots for multiple administrations are provided, wherein doses are uniform or varied. In particular embodiments varied dosing regimens are escalating or decreasing, as appropriate. In some embodiments dosages of an ACE protein and a second agent are independently uniform or independently varying. In certain embodiments, an article of manufacture (kit) comprises an additional agent such as an anti-cancer agent or immune checkpoint molecule. Selection of one or more additional agent will depend on the dosage, delivery, and disease condition to be treated.

### Methods of Treatment and Use of Pharmaceutical Compositions for Treatment

### Treatment of Cancer

[0313] ACE proteins find use in treatment, amelioration or prophylaxis of cancer. In one aspect, the disclosure provides methods of treatment of cancer in an individual in need thereof, comprising administering to the individual a therapeutically effective amount of an ACE protein, as described herein. In some embodiment an ACE protein is provided for use as a therapeutic agent in the treatment or prophylaxis of cancer in an individual. In a further aspect, the disclosure provides a composition comprising such an ACE protein for use in treating or ameliorating cancer in an individual in need thereof.

[0314] Conditions subject to treatment include various cancer indications. For therapeutic purposes, an individual was diagnosed with cancer. For preventative or prophylactic purposes, an individual may be in remission from cancer or may anticipate future onset. In some embodiments, the patient has cancer, is suspected of having cancer, or is in remission from cancer. Cancers subject to treatment with an ACE protein usually derive benefit from activation of cytokine signaling, as described herein. Cancer indications subject to treatment include without limitation: melanoma, lung cancer, colorectal cancer, prostate cancer, breast cancer and lymphoma.

### Treatment of Immune Related Disorder

[0315] ACE proteins find use in treatment, amelioration or prophylaxis of immune related disorder. In one aspect, the disclosure provides methods of treatment of immune related disorder in an individual in need thereof, comprising administering to the individual a therapeutically effective amount of an ACE protein, as described herein. In some embodiment an ACE protein is provided for use as a therapeutic agent in the treatment or prophylaxis of immune related disorder in an individual. In a further aspect, the disclosure provides a composition comprising such an ACE protein for use in treating or ameliorating immune related disorder in an individual in need thereof.

[0316] Conditions subject to treatment include various immune related disorders. For therapeutic purposes, an individual was diagnosed with an immune related disorder. For preventative or prophylactic purposes, an individual may be in remission from an immune related disorder or may anticipate future onset. In some embodiments, the patient has immune related disorder, is suspected of having immune related disorder, or is in remission from immune related disorder Immune related disorders subject to treatment with an ACE protein usually derive benefit from activation of cytokine signaling, as described herein. Immune related disorders subject to treatment include without limitation: inflammatory bowel disease, Crohn's disease, ulcerative colitis, rheumatoid arthritis, psoriasis, type I diabetes, acute pancreatitis, uveitis, Sjogren's disease, Behcet's disease, sarcoidosis, graft versus host disease (GVHD), System Lupus Erythematosus, Vitiligo, chronic prophylactic acute graft versus host disease (pGvHD), HIV-induced vasculitis, Alopecia areata, Systemic sclerosis morphoea, and primary anti-phospholipid syndrome.

### Treatment of Obesity

[0317] ACE proteins find uses in treatment, amelioration or prophylaxis of obesity. In one aspect, the disclosure provides methods of treating obesity in an individual in need thereof, comprising administering to the individual a therapeutically effective amount of an ACE protein as described herein. In some embodiments, an ACE protein is provided for use as a therapeutic agent in the treatment or prophylaxis of obesity in an individual. In a further aspect, the disclosure provides a composition comprising such an ACE protein for use in treating or ameliorating obesity in an individual in need thereof.

[0318] Conditions subject to treatment include various obesity indications. For therapeutic purposes, an individual was diagnosed with obesity. For preventative or prophylactic purposes, an individual may anticipate future onset of obesity. In some embodiments, the patient has obesity, is suspected of having obesity, or is recovering from obesity. Obesity subject to treatment with an antibody cytokine engrafted protein may derive benefits from activation of cytokine signaling, as described herein.

### Administration of ACE Proteins

[0319] A physician or veterinarian can start doses of an ACE protein employed in the pharmaceutical composition at levels lower than that required to achieve the desired therapeutic effect and gradually increase the dosage until the desired effect is achieved. In general, effective doses of the compositions vary depending upon many different factors, including the specific disease or condition to be treated, means of administration, target site, physiological state of the patient, whether a patient is human or an animal, other medications administered, and whether treatment is prophylactic or therapeutic. Treatment dosages typically require titration to optimize safety and efficacy. For administration with an ACE protein, dosage ranges from about 0.0001 to 100 mg/kg, and more usually 0.01 to 5 mg/kg, of the host body weight. For example dosages can be 1 mg/kg body weight or 10 mg/kg body weight or within the range of 1-10 mg/kg. Dosing can be daily, weekly, bi-weekly, monthly, or more or less often, as needed or desired. An exemplary treatment regime entails administration once weekly, once per every two weeks or once a month or once every 3 to 6 months.

[0320] The ACE protein can be administered in single or divided doses. An ACE protein is usually administered on multiple occasions. Intervals between single dosages can be weekly, bi-weekly, monthly or yearly, as needed or desired. Intervals can also be irregular as indicated by measuring blood levels of ACE protein in the patient. In some methods, dosage is adjusted to achieve a plasma ACE protein concentration of 1-1000 μg/ml and in some methods 25-300 μg/ml. Alternatively, ACE proteins can be administered as a sustained release formulation, in which case less frequent administration is required. Dosage and frequency vary depending on the half-life of the ACE protein in the patient. In general, antibody engrafted proteins comprising humanized antibodies show longer half-life than that of native cytokines. Dosage and frequency of administration can vary depending on whether treatment is prophylactic or therapeutic. In general for prophylactic applications, a relatively low dosage is administered at relatively infrequent intervals over a long period of time. Some patients continue to receive treatment for the duration of their lives. In general for therapeutic applications, a relatively high dosage in relatively short intervals is sometimes required until progression of the disease is reduced or terminated, and preferably until the patient shows partial or complete amelioration of symptoms of disease. Thereafter, a patient may be administered a prophylactic regime.

Co-Administration with a Second Agent

[0321] The term “combination therapy” refers to the administration of two or more therapeutic agents to treat a therapeutic condition or disorder described in the present disclosure. Such administration encompasses co-administration of these therapeutic agents in a substantially simultaneous manner, such as in a single capsule having a fixed ratio of active ingredients. Alternatively, such administration encompasses co-administration in multiple, or in separate containers (e.g., capsules, powders, and liquids) for each active ingredient. Powders and/or liquids may be reconstituted or diluted to a desired dose prior to administration. In addition, such administration also encompasses use of each type of therapeutic agent in a sequential manner, either at approximately the same time or at different times. In either case, the treatment regimen will provide beneficial effects of the drug combination in treating the conditions or disorders described herein.

[0322] The combination therapy can provide “synergy” and prove “synergistic”, i.e., the effect achieved when the active ingredients used together is greater than the sum of the effects that results from using the compounds separately. A synergistic effect can be attained when the active ingredients are: (1) co-formulated and administered or delivered simultaneously in a combined, unit dosage formulation; (2) delivered by alternation or in parallel as separate formulations; or (3) by some other regimen. When delivered in alternation therapy, a synergistic effect can be attained when the compounds are administered or delivered sequentially, e.g., by different injections in separate syringes. In general, during alternation therapy, an effective dosage of each active ingredient is administered sequentially, i.e., serially, whereas in combination therapy, effective dosages of two or more active ingredients are administered together.

[0323] In one aspect, the present disclosure provides a method of treating cancer by administering to a subject in need thereof an ACE protein in combination with one or more tyrosine kinase inhibitors, including but not limited to, EGFR inhibitors, Her2 inhibitors, Her3 inhibitors, IGFR inhibitors, and Met inhibitors.

[0324] For example, tyrosine kinase inhibitors include but are not limited to, Erlotinib hydrochloride (Tarceva®); Linifanib (N-[4-(3-amino-1H-indazol-4-yl)phenyl]-N′-(2-fluoro-5-methylphenyl)urea, also known as ABT 869, available from Genentech); Sunitinib malate (Sutent®); Bosutinib (4-[(2,4-dichloro-5-methoxyphenyl)amino]-6-methoxy-7-[3-(4-methylpiperazin-1-yl)propoxy]quinoline-3-carbonitrile, also known as SKI-606, and described in U.S. Pat. No. 6,780,996); Dasatinib (Sprycel®); Pazopanib (Votrient®); Sorafenib (Nexavar®); Zactima (ZD6474); nilotinib (Tasigna®); Regorafenib (Stivarga®) and Imatinib or Imatinib mesylate (Gilvec® and Gleevec®).

[0325] Epidermal growth factor receptor (EGFR) inhibitors include but are not limited to, Erlotinib hydrochloride (Tarceva®), Gefitnib (Iressa®); N-[4-[(3-Chloro-4-fluorophenyl)amino]-7-[[(3″S″)-tetrahydro-3-furanyl]oxy]-6-quinazolinyl]-4(dimethylamino)-2-butenamide, Tovok®); Vandetanib (Caprelsa®); Lapatinib (Tykerb®); (3R,4R)-4-Amino-1-((4-((3-methoxyphenyl)amino)pyrrolo[2,1-f][1,2,4]triazin-5-yl)methyl)piperidin-3-ol (BMS690514); Canertinib dihydrochloride (CI-1033); 6-[4-[(4-Ethyl-1-piperazinyl)methyl]phenyl]-N-[(1R)-1-phenylethyl]-7H-Pyrrolo[2,3-d]pyrimidin-4-amine (AEE788, CAS 497839-62-0); Mubritinib (TAK165); Pelitinib (EKB569); Afatinib (BIBW2992); Neratinib (HKI-272); N-[4-[[1-[(3-Fluorophenyl)methyl]-1H-indazol-5-yl]amino]-5-methylpyrrolo[2,1-f][1,2,4]triazin-6-yl]-carbamic acid, (3S)-3-morpholinylmethyl ester (BMS599626); N-(3,4-Dichloro-2-fluorophenyl)-6-methoxy-7-[[(3aα,5β,6aα)-octahydro-2-methylcyclopenta[c]pyrrol-5-yl]methoxy]-4-quinazolinamine (XL647, CAS 781613-23-8); and 4-[4-[[(1R)-1-Phenylethyl]amino]-7H-pyrrolo[2,3-d]pyrimidin-6-yl]-phenol (PM166, CAS 187724-61-4).

[0326] EGFR antibodies include but are not limited to, Cetuximab (Erbitux®); Panitumumab (Vectibix®); Matuzumab (EMD-72000); Nimotuzumab (hR3); Zalutumumab; TheraCIM h-R3; MDX0447 (CAS 339151-96-1); and ch806 (mAb-806, CAS 946414-09-1).

[0327] Human Epidermal Growth Factor Receptor 2 (HER2 receptor) (also known as Neu, ErbB-2, CD340, or p185) inhibitors include but are not limited to, Trastuzumab (Herceptin®); Pertuzumab (Omnitarg®); Neratinib (HKI-272, (2E)-N-[4-[[3-chloro-4-[(pyridin-2-yl)methoxy]phenyl]amino]-3-cyano-7-ethoxyquinolin-6-yl]-4-(dimethylamino)but-2-enamide, and described PCT Publication No. WO 05/028443); Lapatinib or Lapatinib ditosylate (Tykerb®); (3R,4R)-4-amino-1-((4-((3-methoxyphenyl)amino)pyrrolo[2,1-f][1,2,4]triazin-5-yl)methyl)piperidin-3-ol (BMS690514); (2E)-N-[4-[(3-Chloro-4-fluorophenyl)amino]-7-[[(3S)-tetrahydro-3-furanyl]oxy]-6-quinazolinyl]-4-(dimethylamino)-2-butenamide (BIBW-2992, CAS 850140-72-6); N-[4-[[1-[(3-Fluorophenyl)methyl]-1H-indazol-5-yl]amino]-5-methylpyrrolo[2,1-f][1,2,4]triazin-6-yl]-carbamic acid, (3S)-3-morpholinylmethyl ester (BMS 599626, CAS 714971-09-2); Canertinib dihydrochloride (PD183805 or CI-1033); and N-(3,4-Dichloro-2-fluorophenyl)-6-methoxy-7-[[(3aα,5β,6aα)-octahydro-2-methylcyclopenta[c]pyrrol-5-yl]methoxy]-4-quinazolinamine (XL647, CAS 781613-23-8).

[0328] HER3 inhibitors include but are not limited to, LJM716, MM-121, AMG-888, RG7116, REGN-1400, AV-203, MP-RM-1, MM-111, and MEHD-7945A.

[0329] MET inhibitors include but are not limited to, Cabozantinib (XL184, CAS 849217-68-1); Foretinib (GSK1363089, formerly XL880, CAS 849217-64-7); Tivantinib (ARQ197, CAS 1000873-98-2); 1-(2-Hydroxy-2-methylpropyl)-N-(5-(7-methoxyquinolin-4-yloxy)pyridin-2-yl)-5-methyl-3-oxo-2-phenyl-2,3-dihydro-1H-pyrazole-4-carboxamide (AMG 458); Cryzotinib (Xalkori®, PF-02341066); (3Z)-5-(2,3-Dihydro-1H-indol-1-ylsulfonyl)-3-({3,5-dimethyl-4-[(4-methylpiperazin-1-yl)carbonyl]-1H-pyrrol-2-yl}methylene)-1,3-dihydro-2H-indol-2-one (SU11271); (3Z)—N-(3-Chlorophenyl)-3-({3,5-dimethyl-4-[(4-methylpiperazin-1-yl)carbonyl]-1H-pyrrol-2-yl}methylene)-N-methyl-2-oxoindoline-5-sulfonamide (SU11274); (3Z)—N-(3-Chlorophenyl)-3-{[3,5-dimethyl-4-(3-morpholin-4-ylpropyl)-1H-pyrrol-2-yl]methylene}-N-methyl-2-oxoindoline-5-sulfonamide (SU11606); 6-[Difluoro[6-(1-methyl-1H-pyrazol-4-yl)-1,2,4-triazolo[4,3-b]pyridazin-3-yl]methyl]-quinoline (JNJ38877605, CAS 943540-75-8); 2-[4-[1-(Quinolin-6-ylmethyl)-1H-[1,2,3]triazolo[4,5-b]pyrazin-6-yl]-1H-pyrazol-1-yl]ethanol (PF04217903, CAS 956905-27-4); N-((2R)-1,4-Dioxan-2-ylmethyl)-N-methyl-N′-[3-(1-methyl-1H-pyrazol-4-yl)-5-oxo-5H-benzo[4,5]cyclohepta[1,2-b]pyridin-7-yl]sulfamide (MK2461, CAS 917879-39-1); 6-[[6-(1-Methyl-1H-pyrazol-4-yl)-1,2,4-triazolo[4,3-b]pyridazin-3-yl]thio]-quinoline (SGX523, CAS 1022150-57-7); and (3Z)-5-[[(2,6-Dichlorophenyl)methyl]sulfonyl]-3-[[3,5-dimethyl-4-[[(2R)-2-(1-pyrrolidinylmethyl)-1-pyrrolidinyl]carbonyl]-1H-pyrrol-2-yl]methylene]-1,3-dihydro-2H-indol-2-one (PHA665752, CAS 477575-56-7).

[0330] IGF1R inhibitors include but are not limited to, BMS-754807, XL-228, OSI-906, GSK0904529A, A-928605, AXL1717, KW-2450, MK0646, AMG479, IMCA12, MEDI-573, and BI836845. See e.g., Yee, JNCI, 104; 975 (2012) for review.

[0331] In another aspect, the present disclosure provides a method of treating cancer by administering to a subject in need thereof an ACE protein in combination with one or more FGF downstream signaling pathway inhibitors, including but not limited to, MEK inhibitors, Braf inhibitors, PI3K/Akt inhibitors, SHP2 inhibitors, and also mTor inhibitors.

[0332] For example, mitogen-activated protein kinase (MEK) inhibitors include but are not limited to, XL-518 (also known as GDC-0973, Cas No. 1029872-29-4, available from ACC Corp.); 2-[(2-Chloro-4-iodophenyl)amino]-N-(cyclopropylmethoxy)-3,4-difluoro-benzamide (also known as CI-1040 or PD184352 and described in PCT Publication No. WO2000035436); N-[(2R)-2,3-Dihydroxypropoxy]-3,4-difluoro-2-[(2-fluoro-4-iodophenyl)amino]-benzamide (also known as PD0325901 and described in PCT Publication No. WO2002006213); 2,3-Bis[amino[(2-aminophenyl)thio]methylene]-butanedinitrile (also known as U0126 and described in U.S. Pat. No. 2,779,780); N-[3,4-Difluoro-2-[(2-fluoro-4-iodophenyl)amino]-6-methoxyphenyl]-1-[(2R)-2,3-dihydroxypropyl]-cyclopropanesulfonamide (also known as RDEA119 or BAY869766 and described in PCT Publication No. WO2007014011); (3S,4R,5Z,8S,9S,11E)-14-(Ethylamino)-8,9,16-trihydroxy-3,4-dimethyl-3,4,9,19-tetrahydro-1H-2-benzoxacyclotetradecine-1,7(8H)-dione] (also known as E6201 and described in PCT Publication No. WO2003076424); 2′-Amino-3′-methoxyflavone (also known as PD98059 available from Biaffin GmbH & Co., KG, Germany); Vemurafenib (PLX-4032, CAS 918504-65-1); (R)-3-(2,3-Dihydroxypropyl)-6-fluoro-5-(2-fluoro-4-iodophenylamino)-8-methylpyrido[2,3-d]pyrimidine-4,7(3H,8H)-dione (TAK-733, CAS 1035555-63-5); Pimasertib (AS-703026, CAS 1204531-26-9); and Trametinib dimethyl sulfoxide (GSK-1120212, CAS 1204531-25-80).

[0333] Phosphoinositide 3-kinase (PI3K) inhibitors include but are not limited to, 4-[2-(1H-Indazol-4-yl)-6-[[4-(methylsulfonyl)piperazin-1-yl]methyl]thieno[3,2-d]pyrimidin-4-yl]morpholine (also known as GDC 0941 and described in PCT Publication Nos. WO 09/036082 and WO 09/055730); 2-Methyl-2-[4-[3-methyl-2-oxo-8-(quinolin-3-yl)-2,3-dihydroimidazo[4,5-c]quinolin-1-yl]phenyl]propionitrile (also known as BEZ 235 or NVP-BEZ 235, and described in PCT Publication No. WO 06/122806); 4-(trifluoromethyl)-5-(2,6-dimorpholinopyrimidin-4-yl)pyridin-2-amine (also known as BKM120 or NVP-BKM120, and described in PCT Publication No. WO2007/084786); Tozasertib (VX680 or MK-0457, CAS 639089-54-6); (5Z)-5-[[4-(4-Pyridinyl)-6-quinolinyl]methylene]-2,4-thiazolidinedione (GSK1059615, CAS 958852-01-2); (1E,4S,4aR,5R,6aS,9aR)-5-(Acetyloxy)-1-[(di-2-propenylamino)methylene]-4,4a,5,6,6a,8,9,9a-octahydro-11-hydroxy-4-(methoxymethyl)-4a,6a-dimethyl-cyclopenta[5,6]naphtho[1,2-c]pyran-2,7,10(1H)-trione (PX866, CAS 502632-66-8); and 8-Phenyl-2-(morpholin-4-yl)-chromen-4-one (LY294002, CAS 154447-36-6).

[0334] mTor inhibitors include but are not limited to, Temsirolimus (Torisel®); Ridaforolimus (formally known as deferolimus, (1R,2R,4S)-4-[(2R)-2 [(1R,9S,12S,15R,16E,18R,19R,21R,23S,24E,26E,28Z,30S,32S,35R)-1,18-dihydroxy-19,30-dimethoxy-15,17,21,23,29,35-hexamethyl-2,3,10,14,20-pentaoxo-11,36-dioxa-4-azatricyclo[30.3.1.0^{4,9}]hexatriaconta-16,24,26,28-tetraen-12-yl]propyl]-2-methoxycyclohexyl dimethylphosphinate, also known as AP23573 and MK8669, and described in PCT Publication No. WO 03/064383); Everolimus (Afinitor® or RAD001); Rapamycin (AY22989, Sirolimus®); Simapimod (CAS 164301-51-3); (5-{2,4-Bis[(3S)-3-methylmorpholin-4-yl]pyrido[2,3-d]pyrimidin-7-yl}-2-methoxyphenyl)methanol (AZD8055); 2-Amino-8-[trans-4-(2-hydroxyethoxy)cyclohexyl]-6-(6-methoxy-3-pyridinyl)-4-methyl-pyrido[2,3-d]pyrimidin-7(8H)-one (PF04691502, CAS 1013101-36-4); and N²-[1,4-dioxo-4-[[4-(4-oxo-8-phenyl-4H-1-benzopyran-2-yl)morpholinium-4-yl]methoxy]butyl]-L-arginylglycyl-L-α-aspartylL-serine-(“L-arginylglycyl-L-α-aspartylL-serine” disclosed as SEQ ID NO: 3979), inner salt (SF1126, CAS 936487-67-1).

[0335] In yet another aspect, the present disclosure provides a method of treating cancer by administering to a subject in need thereof an ACE protein in combination with one or more pro-apoptotics, including but not limited to, IAP inhibitors, Bcl2 inhibitors, MCL1 inhibitors, Trail agents, Chk inhibitors.

[0336] For examples, IAP inhibitors include but are not limited to, NVP-LCL161, GDC-0917, AEG-35156, AT406, and TL32711. Other examples of IAP inhibitors include but are not limited to those disclosed in WO04/005284, WO 04/007529, WO05/097791, WO 05/069894, WO 05/069888, WO 05/094818, 052006/0014700, 052006/0025347, WO 06/069063, WO 06/010118, WO 06/017295, and WO08/134679.

[0337] BCL-2 inhibitors include but are not limited to, 4-[4-[[2-(4-Chlorophenyl)-5,5-dimethyl-1-cyclohexen-1-yl]methyl]-1-piperazinyl]-N-[[4-[[(1R)-3-(4-morpholinyl)-1-[(phenylthio)methyl]propyl]amino]-3-[(trifluoromethyl)sulfonyl]phenyl]sulfonyl]benzamide (also known as ABT-263 and described in PCT Publication No. WO 09/155386); Tetrocarcin A; Antimycin; Gossypol ((−)BL-193); Obatoclax; Ethyl-2-amino-6-cyclopentyl-4-(1-cyano-2-ethoxy-2-oxoethyl)-4Hchromone-3-carboxylate (HA14-1); Oblimersen (G3139, Genasense®); Bak BH3 peptide; (−)-Gossypol acetic acid (AT-101); 4-[4-[(4′-Chloro[1,1′-biphenyl]-2-yl)methyl]-1-piperazinyl]-N-[[4-[[(1R)-3-(dimethylamino)-1-[(phenylthio)methyl]propyl]amino]-3-nitrophenyl]sulfonyl]-benzamide (ABT-737, CAS 852808-04-9); and Navitoclax (ABT-263, CAS 923564-51-6).

[0338] Proapoptotic receptor agonists (PARAs) including DR4 (TRAILR1) and DR5 (TRAILR2), including but are not limited to, Dulanermin (AMG-951, RhApo2L/TRAIL); Mapatumumab (HRS-ETR1, CAS 658052-09-6); Lexatumumab (HGS-ETR2, CAS 845816-02-6); Apomab (Apomab®); Conatumumab (AMG655, CAS 896731-82-1); and Tigatuzumab (CS1008, CAS 946415-34-5, available from Daiichi Sankyo).

[0339] Checkpoint Kinase (CHK) inhibitors include but are not limited to, 7-Hydroxystaurosporine (UCN-01); 6-Bromo-3-(1-methyl-1H-pyrazol-4-yl)-5-(3R)-3-piperidinyl-pyrazolo[1,5-a]pyrimidin-7-amine (SCH900776, CAS 891494-63-6); 5-(3-Fluorophenyl)-3-ureidothiophene-2-carboxylic acid N—[(S)-piperidin-3-yl]amide (AZD7762, CAS 860352-01-8); 4-[((3S)-1-Azabicyclo[2.2.2]oct-3-yl)amino]-3-(1H-benzimidazol-2-yl)-6-chloroquinolin-2(1H)-one (CHIR 124, CAS 405168-58-3); 7-Aminodactinomycin (7-AAD), Isogranulatimide, debromohymenialdisine; N-[5-Bromo-4-methyl-2-[(2S)-2-morpholinylmethoxy]-phenyl]-N′-(5-methyl-2-pyrazinyl)urea (LY2603618, CAS 911222-45-2); Sulforaphane (CAS 4478-93-7, 4-Methylsulfinylbutyl isothiocyanate); 9,10,11,12-Tetrahydro-9,12-epoxy-1H-diindolo[1,2,3-fg:3′,2′,1′-kl]pyrrolo[3,4-i][1,6]benzodiazocine-1,3(2H)-dione (SB-218078, CAS 135897-06-2); and TAT-S216A (Sha et al., Mol. Cancer. Ther 2007; 6(1):147-153), and CBP501.

[0340] In one aspect, the present disclosure provides a method of treating cancer by administering to a subject in need thereof an ACE protein in combination with one or more FGFR inhibitors. For example, FGFR inhibitors include but are not limited to, Brivanib alaninate (BMS-582664, (S)—((R)-1-(4-(4-Fluoro-2-methyl-1H-indol-5-yloxy)-5-methylpyrrolo[2,1-f][1,2,4]triazin-6-yloxy)propan-2-yl)2-aminopropanoate); Vargatef (BIBF1120, CAS 928326-83-4); Dovitinib dilactic acid (TKI258, CAS 852433-84-2); 3-(2,6-Dichloro-3,5-dimethoxy-phenyl)-1-{6-[4-(4-ethyl-piperazin-1-yl)-phenylamino]-pyrimidin-4-yl}-1-methyl-urea (BGJ398, CAS 872511-34-7); Danusertib (PHA-739358); and (PD173074, CAS 219580-11-7). In a specific aspect, the present disclosure provides a method of treating cancer by administering to a subject in need thereof an antibody drug conjugate in combination with an FGFR2 inhibitor, such as 3-(2,6-dichloro-3,5-dimethoxyphenyl)-1-(6((4-(4-ethylpiperazin-1-yl)phenyl)amino)pyrimidin-4-yl)-1-methylurea (also known as BGJ-398); or 4-amino-5-fluoro-3-(5-(4-methylpiperazin1-yl)-1H-benzo[d]imidazole-2-yl)quinolin-2(1H)-one (also known as dovitinib or TKI-258). AZD4547 (Gavine et al., 2012, Cancer Research 72, 2045-56, N-[5-[2-(3,5-Dimethoxyphenyl)ethyl]-2H-pyrazol-3-yl]-4-(3R,5S)-diemthylpiperazin-1-yl)benzamide), Ponatinib (AP24534; Gozgit et al., 2012, Mol Cancer Ther., 11; 690-99; 3-[2-(imidazo[1,2-b]pyridazin-3-yl)ethynyl]-4-methyl-N-{4-[(4-methylpiperazin-1-yl)methyl]-3-(trifluoromethyl)phenyl}benzamide, CAS 943319-70-8).

[0341] The ACE proteins can also be administered in combination with another cytokine, or ACE protein. In some embodiments, the cytokine is IL15, IL15-Fc, IL15 linked to a sushi domain of IL15 receptor or IL15/soluble IL15Ra. In some embodiments, the cytokine is interleukin-10 (IL-10), interleukin-11 (IL-11), Ciliary neurotrophic factor (CNTF), Oncostatin M (OSM) or leukemia inhibitory factor (LIF).

[0342] The ACE proteins can also be administered in combination with an immune checkpoint inhibitor. In one embodiment, the ACE proteins can be administered in combination with an inhibitor of an immune checkpoint molecule chosen from one or more of PD-1, PD-L1, PD-L2, TIM3, CTLA-4, LAG-3, CEACAM-1, CEACAM-5, VISTA, BTLA, TIGIT, LAIR1, CD160, 2B4 or TGFR In one embodiment, the immune checkpoint inhibitor is an anti-PD-1 antibody, wherein the anti-PD-1 antibody is selected from Nivolumab, Pembrolizumab or Pidilizumab. In some embodiments, the anti-PD-1 antibody molecule is Nivolumab. Alternative names for Nivolumab include MDX-1106, MDX-1106-04, ONO-4538, or BMS-936558. In some embodiments, the anti-PD-1 antibody is Nivolumab (CAS Registry Number: 946414-94-4). Nivolumab is a fully human IgG4 monoclonal antibody which specifically blocks PD1. Nivolumab (clone 5C4) and other human monoclonal antibodies that specifically bind to PD1 are disclosed in U.S. Pat. No. 8,008,449 and WO2006/121168.

[0343] In some embodiments, the anti-PD-1 antibody is Pembrolizumab. Pembrolizumab (also referred to as Lambrolizumab, MK-3475, MK03475, SCH-900475 or KEYTRUDA®; Merck) is a humanized IgG4 monoclonal antibody that binds to PD-1. Pembrolizumab and other humanized anti-PD-1 antibodies are disclosed in Hamid, O. et al. (2013) New England Journal of Medicine 369 (2): 134-44, U.S. Pat. No. 8,354,509 and WO2009/114335.

[0344] In some embodiments, the anti-PD-1 antibody is Pidilizumab. Pidilizumab (CT-011; Cure Tech) is a humanized IgG1k monoclonal antibody that binds to PD1. Pidilizumab and other humanized anti-PD-1 monoclonal antibodies are disclosed in WO2009/101611.

[0345] Other anti-PD1 antibodies include AMP 514 (Amplimmune) and, e.g., anti-PD1 antibodies disclosed in U.S. Pat. No. 8,609,089, US 2010/028330, and/or US 2012/0114649 and US2016/0108123.

[0346] In some embodiments, the ACE proteins can be administered with the anti-Tim3 antibody disclosed in US2015/0218274. In other embodiments, the ACE proteins can be administered with the anti-PD-L1 antibody disclosed in US2016/0108123, Durvalumab® (MEDI4736), Atezolizumab® (MPDL3280A) or Avelumab®, or the anti-PD-L1 antibody disclosed in WO2016/061142.

[0347] In some embodiments, the pharmacological compositions comprise a mixture of an antibody cytokine engrafted protein and one or more additional pharmacological agent(s). Exemplary second agents for inclusion in mixtures with the present antibody cytokine engrafted protein include without limitation anti-inflammatory agents, immunomodulatory agents, aminosalicylates, and antibiotics. Appropriate selection may depend on preferred formulation, dosage and/or delivery method.

[0348] In some embodiments an antibody cytokine engrafted protein is co-formulated (i.e., provided as a mixture or prepared in a mixture) with an anti-inflammatory agent. In particular embodiments, corticosteroid anti-inflammatory agents can be used in conjunction with the antibody cytokine engrafted protein. Corticosteroids for use can be selected from any of methylprednisolone, hydrocortisone, prednisone, budenisonide, mesalamine, and dexamethasone. Appropriate selection will depend on formulation and delivery preferences.

[0349] In some embodiments, an antibody cytokine engrafted protein is co-formulated with an immunomodulatory agent. In particular embodiments, the immunomodulatory agent is selected from any of 6-mercaptopurine, azathioprine, cyclosporine A, tacrolimus, and methotrexate. In a particular embodiment, the immunomodulatory agent is selected from an anti-TNF agent (e.g., infliximab, adalimumab, certolizumab, golimumab), natalizumab, and vedolizumab.

[0350] In some embodiments an antibody cytokine engrafted protein is co-formulated with an aminosalicylate agent. In particular embodiments, an aminosalicylate is selected from sulfasalazine, mesalamine, balsalazide, olsalazine or other derivatives of 5-aminosalicylic acid.

[0351] In some embodiments an antibody cytokine engrafted protein is co-formulated with an antibacterial agent. Exemplary antibacterial agents include without limitation sulfonamides (e.g., sulfanilamide, sulfadiazine, sulfamethoxazole, sulfisoxazole, sulfacetamide), trimethoprim, quinolones (e.g., nalidixic acid, cinoxacin, norfloxacin, ciprofloxacin, ofloxacin, sparfloxacin, fleroxacin, perloxacin, levofloxacin, garenoxacin and gemifloxacin), methenamine, nitrofurantoin, penicillins (e.g., penicillin G, penicillin V, methicilin oxacillin, cloxacillin, dicloxacillin, nafcilin, ampicillin, amoxicillin, carbenicillin, ticarcillin, mezlocillin, and piperacillin), cephalosporins (e.g., cefazolin, cephalexin, cefadroxil, cefoxitin, cefaclor, cefprozil, cefuroxime, cefuroxime acetil, loracarbef, cefotetan, ceforanide, cefotaxime, cefpodoxime proxetil, cefibuten, cefdinir, cefditoren pivorxil, ceftizoxime, ceftriaxone, cefoperazone, ceftazidime, and cefepine), carbapenems (e.g., imipenem, aztreonam), and aminoglycosides (e.g., neomycin, kanamycin, streptomycin, gentamicin, toramycin, netilmicin, and amikacin).

### EXAMPLES

### Example 1: Creation of ACE Protein Constructs

[0352] ACE proteins were generated by engineering a cytokine sequence into CDR regions of various immunoglobulin scaffolds, then both heavy and light chain immunoglobulin chains were used to generate final ACE proteins. ACE proteins confer preferred therapeutic properties of the cytokine; and have additional beneficial effects, such as increased half-life, and ease of manufacture.

[0353] To create ACE proteins, a mature form of a cytokine sequence was inserted into CDR loops of an immunoglobulin chain scaffold. Cytokines chosen for ACE proteins are listed in TABLE 1, with the addition of IL2 ACE molecules. ACE proteins were prepared using a variety of known immunoglobulin sequences which have been utilized in clinical settings as well as germline antibody sequences. Sequences of cytokines in exemplary scaffolds, referred to as GFTX3b and GFTX are depicted in TABLE 2. Insertion points were selected to be the mid-point of the CDR loop based on available structural or homology model data. ACE proteins were produced using standard molecular biology methodology utilizing recombinant DNA encoding the relevant sequences.

[0354] The selection of which CDR was chosen for cytokine engraftment was on the parameters of: the required biology, biophysical properties and a favorable development profile. Modeling software was only partially useful in predicting which CDR and which location within the CDR will provide the desired parameters, so therefore all six possible antibody cytokine grafts are made and then evaluated in biological assays. If the required biological activity is achieved, then the nature of the interactions of the ACE molecule with the respective cytokine receptor is resolved.

[0355] For the ACE proteins, the structure of the antibody candidate considered for cytokine engrafting was initially solved. Because of the engrafting technology, each ACE protein is constrained by a CDR loop of different length, sequence and structural environments. As such, each cytokine was engrafted into all six CDRs, corresponding to HCDR1, HCDR2, HCDR3 and LCDR1, LCDR2, LCDR3.

[0356] For the selection of the insertion point, the structural center of the CDR loop was chosen as this would provide the most space on either side (of linear size 3.8 Å×the number of residues on an adjacent side) and without being bound by any one theory, this provided a stable molecule by allowing the cytokine to more readily fold independently. As the structures of the grafting scaffolds GFTX3b and GFTX were already known, the structural center of each CDR was also known. This usually coincides with the center of the CDR loop sequence as defined using the Chothia numbering format.

[0357] In summary, the insertion point in each CDR was chosen on a structural basis, and which CDR graft was best for the cytokine was based on desired biology and biophysical properties. The nature of the cytokine receptor, the cytokine/receptor interactions and the mechanism of signaling also played a role and this was investigated by comparing each individual antibody cytokine molecule for their respective properties.

Lengthy table referenced here
US20200362058A1-20201119-T00001
Please refer to the end of the specification for access instructions.

Lengthy table referenced here
US20200362058A1-20201119-T00002
Please refer to the end of the specification for access instructions.

### Example 2: In Vitro Activity of ACE Proteins in Mouse Splenocytes

[0358] Cells were isolated from mouse spleens and single cell suspensions were added to each well. Each IL7 ACE protein, recombinant human IL7, or IL7-Fc molecule was added to the wells, and incubated for 30 minutes at 37° C. After 20 minutes, cells were fixed with Cytofix buffer (BD #554655), washed and stained with surface markers. After 30 minutes at room temperature, samples were washed and re-suspended cell pellets were permeabilized with −20° C. Perm Buffer III (BD #558050), washed and stained with pSTAT5 Ab (BD #612567). Cells were acquired on LSR Fortessa and data analyzed with FlowJo® software. Data was graphed with Prism® software.

[0359] IL7 ACE proteins were assessed for stimulation on the IL7Ra on mouse splenocytes. All of the IL7 ACE proteins displayed increased activation of the IL7Ra pathway on both CD8 (FIG. 3A) and CD4 (FIG. 3B) T cells when compared to equimolar amounts of recombinant human IL7 (rec hIL7), as well as human IL-7 combined to an Fc portion. Thus, grafting of IL7 increases the potency of the cytokine.

### Example 3: In Vitro Activity of IL7ACE Proteins in Human PBMCs

[0360] PBMC cells were placed in serum-free test media, and IL7 ACE protein or recombinant human IL7 was added to the cells and incubated for 20 minutes at 37° C. After 20 minutes, cells were fixed with 1.6% formaldehyde, washed and stained with surface markers. After 30 minutes at room temperature, samples were washed and re-suspended cell pellets were permeabilized with −20° C. methanol, washed and stained with pSTAT5 Ab (BD #612567) and DNA intercalators. Cells were run on Cytof and data analyzed with FlowJo® software.

[0361] All the molecules tested, independent of its format, induced activation of the IL7Ra pathway on both CD8 and CD4 T cells, but not B cells or NK cells, when compared to wild-type scaffold or unstimulated cells (FIG. 4A). In addition, both CD8 (FIG. 4B) and CD4 (FIG. 4C) T cells were strongly activated, by either recombinant hIL7, or the IL7 ACE proteins IgG.IL7.H3 and IgG.IL7.H2, and independent of the concentration used. Thus, hIL7 ACE proteins strongly stimulate both CD8 and CD4 human T cells, without stimulating B cells or NK cells.

### Example 4: In Vivo Activity of hIL7 ACE Proteins in C57B16 Mice

[0362] B6 female mice were administered hIL7, hIL7-Fc and IL7 ACE proteins once a day for 4 days at different concentrations. One day after last treatment (day 5), spleens were processed to obtain a single cell suspension and washed in RPMI (10% FBS). Red blood cells were lysed with Red Blood Cell Lysis Buffer (Sigma #R7757) and cells counted for cell number and viability. FACS staining was performed under standard protocols using FACS buffer (1×PBS+0.5% BSA+0.05% sodium azide). Cells were stained with surface antibodies: Rat anti-mouse CD8-BUV737 (BD Biosciences #564297), Rat anti-mouse CD19-PeCF594/TR (BD Biosciences #562291), Rat anti-mouse CD3-PerCP (Biolegend #100218), Rat anti-mouse CD127-e450 (ebioscience #48-1273-82), Rat anti-mouse CD4-BV510 (BD Biosciences #563106), Rat anti-mouse CD44-BV711 (BD Biosciences #563971), Rat anti-mouse CD62L-APC-Cy7 (BD Biosciences #560514), and subsequently fixed/permeabilized and stained for both Rat anti-mouse Ki-67-e660 (ebioscience #50-5698-82) and FoxP3 according to the Anti-Mouse/Rat FoxP3 FITC Staining Set (ebioscience #71-5775-40). Cells were analyzed on the BD LSR Fortessa or BD FACS LSR II, and data analyzed with FlowJo® software. Data was graphed with Prism software.

[0363] From the six different IL7 ACE proteins tested, IgG.IL7.H3 and IgG.IL7.H2 consistently increased CD8 Ki67+ T cells (FIG. 5A-B), as well as the frequency of effector memory (CD44_{high} CD62L_{low}) T cells (FIG. 5C-D) after daily IP administration for 4 consecutive days. IgG.IL7.H3 and IgG.IL7.H2 consistently increased CD4+ T cells as well (data not shown). Of note, the molar amount of IL7 ACE proteins was 5 times lower than the amount used for Fc fusion IL7 to achieve the same relative expansion of CD8+ and CD4+ T cells. All of the IL7 ACE proteins were well tolerated by the mice, and no ill effects were seen.

### Example 5: In Vivo Activity of IL7ACE Proteins in a CT26 Syngeneic Mouse Tumor Model

[0364] CT26 (ATCC) cells are an aggressive, undifferentiated human colorectal cancer line and frequently used to test anti-cancer activity of molecules in syngeneic mouse models. CT26 cells were grown in sterile conditions in a 37° C. incubator with 5% CO². The cells were cultured in RPMI 1640 media supplemented with 10% FBS. Cells were passaged every 3-4 days. For the day of injection, cells were harvested at passage 11 and re-suspended in HBSS at a concentration of 2.5×10⁶/ml. Cells were Radil tested for mycoplasma and murine viruses. For each mouse, 0.25×10⁶ cells were implanted with subcutaneously injection into right flank using a 28g needle (100 μl injection volume). After implantation, animals were calipered and weighed 3 times per week once tumors were palpable. Caliper measurements were calculated using (L×W×W)/2. Mice were fed with normal diet and housed in SPF animal facility in accordance with the Guide for Care and Use of Laboratory Animals and regulations of the Institutional Animal Care and Use Committee.

[0365] When tumors reached about 100 mm³, mice were administered 20-100 μg of IL7-flag, IL7-Fc-fusion, or the IL7 ACE proteins IgG.IL7.H3 and IgG.IL7.H2, intraperitoneally twice per week for a total of 4 doses. Tumors were measured twice a week. Average tumor volumes were plotted using Prism 5 (GraphPad) software. An endpoint for efficacy studies was achieved when tumor size reached a volume of 1000 mm3. Following injection, mice were also closely monitored for signs of clinical deterioration. The mice were monitored for any signs of morbidity, including respiratory distress, hunched posture, decreased activity, hind leg paralysis, tachypnea as a sign for pleural effusions, weight loss approaching 20% or 15% plus other signs, or if their ability to carry on normal activities (feeding, mobility).

[0366] One day after last treatment (day 13), spleens and tumors were collected. Spleens were processed to obtain a single cell suspension and washed in RPMI (10% FBS). Red blood cells were lysed with Red Blood Cell Lysis Buffer (Sigma #R7757) and cells counted for cell number and viability. FACS staining was performed under standard protocols using FACS buffer (1×PBS+0.5% BSA+0.05% sodium azide). Cells were stained with the following surface antibodies: Rat anti-mouse CD8-BUV737 (BD Biosciences #564297), Rat anti-mouse CD19-PeCF594/TR (BD Biosciences #562291), Rat anti-mouse CD3-PerCP (Biolegend #100218), Rat anti-mouse CD127-e450 (ebioscience #48-1273-82), Rat anti-mouse CD4-BV510 (BD Biosciences #563106), Rat anti-mouse CD44-BV711 (BD Biosciences #563971), Rat anti-mouse CD62L-APC-Cy7 (BD Biosciences #560514), and subsequently fixed/permeabilized and stained for both Rat anti-mouse Ki-67-e660 (ebioscience #50-5698-82) and FoxP3 according to the Anti-Mouse/Rat FoxP3 FITC Staining Set (ebioscience #71-5775-40). Cells were analyzed on the BD LSR Fortessa® or BD FACS LSR II, and data analyzed with FlowJo® software. Tumors were fixed in formalin and paraffin embedded for Immunohistochemistry staining against mouse CD8 (eBioscience #14-0808-82) and mouse CD4 (Abcam #ab183685). The numbers of positive cells were quantified using Matlab software (MathWorks), Data was graphed with Prism software.

[0367] The ACE proteins IgG.IL7.H3 and IgG.IL7.H2 were tested in vivo for their efficacy against CT26 tumors. Administration of IgG.IL7.H2 or IgG.IL7.H2 significantly decreased tumor growth when compared to an IL7 flag protein or an IL7-Fc fusion at equimolar doses (FIG. 6A). The same trend was observed at lower doses (FIG. 6B). Also, the frequency of effector memory (CD44_{high}/CD62L_{low}) CD8+ T cells was significantly increased in mice treated with IgG.IL7.H3 and IgG.IL7.H2 when compared to control groups (FIG. 6C), one day after the last of 4 doses. In addition, the frequencies of both CD8 and CD4+ Tumor Infiltrating Lymphocytes (TILs) were increased at high doses of IgG.IL7.H3 and IgG.IL7.H2 when compared to control groups (FIGS. 6D, and 6E respectively). Therefore, the ACE proteins IgG.IL7.H3 and IgG.IL7.H2 showed enhanced IL7 activity, reduced tumor volume as a single agent, and increased the number of TILs when compared to recombinant IL7.

### Example 6: Activity of IL7 ACE Proteins in an Ex Vivo Model of Exhaustion

[0368] B6 female mice were intravenously (iv) infected with 2×10⁶ PFU of Lymphocytic Choriomeningitis Virus (LCMV) clone 13. Three weeks after infection, spleens were collected and processed to obtain a single cell suspension. After B cell depletion using the EasySep™ StemCell B cell depletion kit (Stemcell, Cambridge Mass.) cells were added to wells in RPMI (10% FBS) with a cocktail of three MHC-I and one MHC-II LCMV-specific peptides, with (Media+anti-PD-L1) or without (Media) anti-PD-L1 antibody. INF gamma was measured after 24 hours by ELISA and data was graphed with Prism software.

[0369] The ACE proteins IgG.IL7.H3 increased IFN-gamma production in synergy with anti-PD-L1 antibody. While the addition of recombinant human IL7 did not result in any further increase in IFN-gamma production respect to anti-PD-L1 treatment (DMSO), addition of IgG.IL7.H3 resulted in a significant increase of IFN-gamma (FIG. 7). Thus, IL7 ACE proteins were able to revert the exhaustion phenotype of CD8+ T cells in an ex vivo model.

### Example 7: Structural Resolution of IgG.IL7.H3 and IgG.IL7.H2

[0370] FIG. 8 is a structural diagram of IgG.IL7.H2 and IgG.IL7.H3, respectively as inserted into a Fab fragment. For IgG.IL7.H3, FIG. 8 demonstrates that by engrafting IL7 into either HCDR2 or HCDR3, the IL7 molecule is exposed and available for binding to the IL7Ra, and that the IgG sequences do not interfere.

### Example 8: Binding of Antibody Cytokine Engrafted Proteins

[0371] IL7 sequences were inserted into CDR loops of an immunoglobulin chain scaffold. Antibody cytokine engrafted proteins were prepared using a variety of known immunoglobulin sequences which have been utilized in clinical settings as well as germline antibody sequences. One of the antibodies used has RSV as its target antigen. To determine if engrafting IL7 into the CDRs of this antibody reduced binding to RSV, an ELISA assay was run on RSV proteins either in PBS or a carbonate buffer. As shown in FIG. 9, this appears to be influenced by which CDR was chosen for IL7 engrafting. For example, IL7 engrafted into heavy chain CDR1 (CDR-H1) has RSV binding similar to the ungrafted (un-modified) original antibody. In contrast, engrafting IL7 into heavy chain CDR2 (CDR-H2) and into CDR-H3 reduces binding to RSV. IL7 engrafted into light chain CDR3 (CDR-L3) has almost no RSV binding. As expected, IL2 engrafted into a GFTX antibody scaffold which targets IgE produces no binding. This demonstrates that antibody cytokine engrafted proteins can retain binding to the original target of the antibody scaffold, or this binding can be reduced.

### Example 9: In Vivo Pharmacokinetics of IL7 Antibody Cytokine Engrafted Proteins in CD1 Mice

[0372] CD1 female mice were administered a single dose of equimolar amounts of IL7, IL7-Fc and IL7 cytokine engrafted proteins, and IL7 protein was measured by Gyros assay in serum samples at different time points (FIG. 10). Data was analysed and graphed with Prism software.

[0373] From the six different IL7 proteins tested, IgG.IL7.H2 showed the best exposure when compared to the other formats (FIG. 10). Of note, the amount of recombinant human IL7 was below the Limit of Quantification (LOQ) after just 6 hours, while the same was true for the Fc fusion IL7 after 24 hours. All of the IL7 antibody cytokine engrafted proteins were measurable up to 72 hours.

### Example 10: Activity of IgG.IL7.H2 Cytokine Engrafted Protein in an In Vivo Model of T Cell Exhaustion

[0374] B6 female mice were intravenously (iv) infected with 2×10⁶ PFU of Lymphocytic Choriomeningitis Virus (LCMV) clone 13. Three weeks after infection, mice were administered with 200 μg of an Isotype control antibody alone, 100 μg of IgG.IL7.H2 alone, 200 μg of anti-PD-L1 alone, or co-dose with 100 μg of IgG.IL7.H2 plus 200 μg of anti-PD-L1 twice a week for 2 weeks. Three days after last dose (day 35), blood, spleen cells and liver were analysed.

[0375] Spleen and blood were processed to obtain a single cell suspension and washed in RPMI (10% FBS). Red blood cells were lysed with Red Blood Cell Lysis Buffer (Sigma #R7757) and cells counted for cell number and viability. FACS staining was performed under standard protocols using FACS buffer (1×PBS+0.5% BSA+0.05% sodium azide). Cells were stained with the following surface antibodies and tetramer molecules: Rat anti-mouse CD8-PerCP (BD Biosciences #553036), Rat anti-mouse CD19-APC-Cγ7 (BD Biosciences #560143), Rat anti-mouse KLRG1-BV421 (BD Biosciences #560733), Rat anti-mouse CD127-PE-Cγ7 (BD Biosciences #560733), Rat anti-mouse CD4-BUV395 (BD Biosciences #563790), Rat anti-mouse CD44-BUV737 (BD Biosciences #564392), Rat anti-mouse CD62L-FITC (Tonbo #35-0621-U100), Rat anti-mouse CD366-APC (Biolegend #119706), Rat anti-mouse CD279-BV605 (Biolegend #135219), T-Select H-2Db LCMV gp33 (C9M) Tetramer-PE (MBL #TS-M512-1) and T-Select H-2Db LCMV gp276-286 Tetramer-BV421 (MBL #TB-5009-4). Cells were analyzed on the BD LSR Fortessa® or BD FACS LSR II, and data analyzed with FlowJo® software. Data was graphed with Prism® software.

[0376] An increase in virus-specific CD8+ T cells was observed in the blood upon dosing with IgG.IL7.H2 antibody cytokine engrafted protein, independent of the presence of anti-PD-L1 antibody (FIG. 11). An increase in total numbers of naïve, central memory and effector memory CD8+ T cells was also observed in the blood upon dosing with IgG.IL7.H2 cytokine engrafted protein, but not with anti-PD-L1 alone (FIG. 13). Analysis of spleen cells also showed that IgG.IL7.H2 antibody cytokine engrafted protein induces the reduction of another checkpoint molecule Tim-3, either alone or in combination with anti-PD-L1 (FIG. 12). In addition, dosing with IgG.IL7.H2 cytokine engrafted protein also induces an increase in CD8+PD-1+ cells, known to be the best responder upon PD-1 blocking therapies (FIG. 14).

[0377] Addition of the IgG.IL7.H2 cytokine engrafted protein, in combination with anti-PD-L1, resulted in a significant increase of IFN-gamma (FIG. 16). Taken together these data indicated that the IgG.IL7.H2 antibody cytokine engrafted protein reverted the exhaustion phenotype of CD8+ T cells in an in vivo model. Analysis of viral RNA in the liver indicates that administration of IgG.IL7.H2 was able to reduce viral load as a single agent (FIG. 15). Anti-PD-L1 antibody and the combination of IgG.IL7.H2 and an anti-PD-L1 antibody further reduced viral load (FIG. 15).

### Example 11: Antibody Cytokine Engrafted Proteins Show Greater Activity on Treg Cells and Increased Half Life

[0378] IgG.IL2D49A.H1 and IgG.IL2.L3 were selected as they achieved the desired biological effects over Proleukin® (FIG. 17 summarizes relative changes). These effects include; selectivity for the IL-2R on Tregs vs. Tcon and NK cells, greater half-life expansion of Tregs vs. Tcon and NK cells in mice.

[0379] In assessing for high affinity IL-2 receptor stimulation, both Proleukin® and IgG.IL2D49A.H1 graft showed comparable signal potency on Treg cells, but IgG.IL2D49A.H1 showed decreased to no activity on both CD8 Teffector cells and NK cells, unlike Proleukin®. IL2 engrafted into CDRL3 (IgG.IL2.L3) showed less signal potency on Tregs than Proleukin®, but no activity on NK cells. Human Peripheral blood mononuclear cells (hPBMC) were purchased from HemaCare Corp. and tested in vitro with either Proleukin®, IgG.IL2D49A.H1 or IgG.IL2.L3 to assess selective activity on the IL-2 high affinity receptor. Cells were rested in serum free test media, and added to each well. Either antibody cytokine engrafted protein or native human IL-2 were added to the wells, and incubated for 20 min at 37° C. After 20 min, cells were fixed, stained with surface markers, permeabilized and stained with STAT5 antibody (BD Biosciences) following manufacturer's instructions.

[0380] Pharmacokinetics of IgG.IL2D49A.H1 or IgG.IL2.L3 in plasma showed an extended half-life over Proleukin® after only 1 dose. Cellular expansion was assessed in the spleen of pre-diabetic NOD mice 8 days after one treatment with either Proleukin® or the grafts. IgG.IL2D49A.H1 achieved superior Treg expansion over Teffector cells and NK cells and was better tolerated than Proleukin® in pre-diabetic mice. The summary of the STAT5 stimulation, the PK/PD of IgG.IL2D49A.H1 and IgG.IL2.L3 is shown in FIG. 18. This shows that antibody cytokine engrafted proteins can not only have greater half-life than Proleukin®, but stimulation of the targeted Treg cells, without unwanted stimulation of Teffector and NK cells.

### Example 12: Antibody Cytokine Engrafted Protein Shows Greater Activity on Treg Cells

[0381] Pre-diabetic NOD mice were administered equimolar Proleukin® (3× weekly) and different antibody cytokine engrafted proteins (1×/week). Eight days after first treatment, spleens were processed to obtain a single cell suspension and washed in RPMI (10% FBS). Red blood cells were lysed with Red Blood Cell Lysis Buffer (Sigma #R7757) and cells counted for cell number and viability. FACS staining was performed under standard protocols using FACS buffer (1×PBS+0.5% BSA+0.05% sodium azide). Cells were stained with surface antibodies: Rat anti-mouse CD3-BV605 (BD Pharmingen #563004), Rat anti-mouse CD4-Pacific Blue (BD Pharmingen #558107), Rat antimouse CD8-PerCp (BD Pharmingen #553036), CD44 FITC (Pharmingen #553133) Rat anti-mouse CD25-APC (Ebioscience #17-0251), and subsequently fixed/permeabilized and stained for FoxP3 according to the Anti-Mouse/Rat FoxP3 Staining Set PE (Ebioscience #72-5775). Cells were analyzed on the BD LSR Fortessa® or BD FACS LSR II®, and data analyzed with FlowJo® software. FIG. 19 shows the fold values and ratios calculated from each spleen as an absolute number, comparing IgG.IL2D49A.H1 and IgG.IL2D113A.H1 with Proleukin®. The increased expansion of Treg cells without expansion of CD 8 T effector cells or NK cells with IgG.IL2D49A.H1 is shown in the top row. This is in contrast to low dose and higher dose Proleukin®, which leads to expansion of all cell types.

### Example 13: IL-2R Signaling Potency is Reduced in CD4 Tcon and CD8 Teff but not in Tregs In Vitro

[0382] Both Proleukin® and IgG.IL2D49A.H1 were tested in vitro for signal potency on the IL-2R, on both human and cynomologus monkey PBMC. Both IgG.IL2D49A.H1 and Proleukin® at equimolar IL2 concentrations showed similar signal potency on the Treg cells which express high affinity IL-2R, but only IgG.IL2D49A.H1 showed reduced potency on conventional CD4 and CD8 T effector cells which express the low affinity IL-2 receptor. These results were observed in both human and cynomolgus PBMC. For the assay, PBMC cells were rested in serum-free test media, and added to each well. Either IgG.IL2D49A.H1 or Proleukin® were added to the wells, and incubated for 20 minutes at 37° C. After 20 minutes, cells were fixed, stained with surface markers, permeabilized and stained with STAT5 antibody (BD Biosciences) following manufacturer's instructions. Cells were analyzed on the BD LSR Fortessa® and data analyzed with FlowJo® software.

[0383] This result as shown in FIG. 20 was especially apparent. Both in human and cynomolgus PBMC, pSTAT5 activation by IgG.IL2D49A.H1 was found on Tregs, with very little on CD8 T effectors.

### Example 14: IgG.IL2D49A.H1 expands functional and stable Tregs in vitro

[0384] Improved selectivity for Tregs is accompanied by a functional effect. Tregs expanded with IgG.IL2D49A.H1 are equivalent or better suppressors of Teffectors than Proleukin® expanded Tregs. For this assay, human PBMC were purified from whole blood by centrifugation over Ficoll-Hypaque gradients (GE HealthCare cat #17-1440-03). PBMCs were RBC Lysed (Amimed cat #3-13F00-H). CD4+ Tcells were enriched using EasySep CD4+ T-cell enrichment kit (StemCell Technologies cat #19052). Enriched CD4+ were stained with V500 anti-CD4 (clone RPAT4), PerCP-Cy5.5 anti-CD127 (and APC anti-CD25 and sorted to isolate CD4+CD127-CD25+ natural regulatory T cells (nTregs) and CD4+CD127+CD25− T responder (Tresp). Sorted Tregs were plated (1×10⁵/100 μl/well) in replicates in 96-well round-bottom microplates filled with medium and stimulated with microbeads at 3:1 bead-to-cell ratios in the presence of 1 or 0.3 nM Proleukin® or IgG.IL2D49A.H1 at equimolar IL2 concentrations. After 24 hour incubation at 37° C., wells were refilled with 100 μl medium containing the same IL2 concentration. On day 3, cultures were suspended, split in half and refilled with 100 μl medium containing the same IL2 concentration. On day 6, cultures were processed as on day 3. On day 8, cells were harvested, pooled in tubes and the beads removed by placing tubes on a multistand magnet for 1-2 minutes. Supernatants containing cells were collected and centrifuged at 200 g for 5 minutes at room temperature. Cells were then counted, and plated again at about 5×10⁵/ml in 48-well flat-bottom microplates filled with medium containing 1/5 of the original IL2 concentration. After 2 days rest, cells were harvested, counted and analyzed or used in suppression assay. Expanded Tregs and freshly thawed CD4+CD127+CD25− T responder (Tresp) cells were labeled as described in manufacturer's instructions with 0.8 μM CTViolet (Life Technologies cat #C34557) and 1 μM CFSE (Life Technologies cat #C34554), respectively. To assess the suppressive properties of expanded Tregs, 3×10⁴ CFSE-labeled Tresp were plated in triplicates alone or with CTViolet-labeled Tregs (different Tresp:Treg ratio) and stimulated with Dynabeads at 1:8 bead-to-cell ratio (final volume 200 μl/well). After 4-5 days, cells were collected and the proliferation of responder cells evaluated by flow cytometry.

[0385] The methylation status was evaluated in fresh and expanded Tregs compared with Tresp cells. Genomic DNA (gDNA) was isolated from >5.00E+05 cells using Allprep® DNA/RNA Mini from Qiagen (cat #80204). Then, 200 ng of gDNA was processed using Imprint® DNA modification kit from Sigma (cat #MOD50) to convert unmethylated cytosines to uracil (while the methylatd cytosines remain unchanged). Quantitative methylation was then evaluated on 8 ng of bisulfite converted gDNA using sequence-specific probe-based real-time PCR utilizing EpiTect MethyLight® PCR+ROX (Qiagen cat #59496), Epitect control DNA (Qiagen cat #59695), Standard methylated (Life Technologies, cat #12AAZ7FP) and unmethylated (Life Technologies, cat #12AAZ7FP) plasmids, Treg-specific demethylated region (TSDR) methylated and unmethylated forward and reverse primers, and probes (MicroSynth). % of methylation was calculated as described in the EpiTect MethyLight® PCR Handbook.

[0386] FIG. 21 shows graphically the stable demethylation of the Foxp3 locus with Proleukin® and IgG.IL2D49A.H1 expanded Tregs. Human Tregs expanded with IgG.IL2D49A.H1 in vitro are stable by Foxp3 expression and demethylation, which leads to stable Treg cells.

### Example 15: Potency on IL-2R Signaling Reduced in Human NKs In Vitro with IgG.IL2D49.H1

[0387] IgG.IL2D49A.H1 showed reduced potency of signaling in NK cells compared to Proleukin® at equimolar concentrations. PBMC cells were rested in serum-free test media, and added to each well. Either IgG.IL2D49A.H1 or Proleukin® were added to the wells, and incubated for 20 minutes at 37° C. After 20 minutes, cells were fixed with 1.6% formaldehyde, washed and stained with surface markers. After 30 minutes at room temperature, samples were washed and re-suspended cell pellets were permeabilized with −20° C. methanol, washed and stained with STAT5 and DNA intercalators. Cells were run on Cytof and data analyzed with FlowJo® software. The results are shown in FIG. 22, wherein IgG.IL2D49A.H1 had little to no effect on NK cells. In contrast, Proleukin® treatement increased pSTAT5 activity on NK cells, as an undesired side effect of the Proleukin® treatment.

### Example 16: Evaluation of the Pharmacokinetic (PK), Pharmacodynamics (PD), and Toxicological Effects of IgG.IL2D49A.H1

[0388] IgG.IL2D49A.H1 in cynomolgus monkeys showed extended pharmacokinetics, superior Treg expansion over Teffector cells and less toxicity than low-dose Proleukin®. This nonclinical laboratory study was conducted in accordance with the Novartis Animal Care and Use Committee-approved generic protocol no. TX 4039, with this protocol and with facility Standard Operating Procedures (SOPs).

[0389] Animals were dosed subcutaneously with either IgG.IL2D49A.H1 or Proleukin® on the first day of the study. Blood was collected from all animals at each dose level on study. Day 1 at pre-dose, 1 hour, 6 hours and 12 hours post-dose, and then days 2, 3, 4, 5, 6, 7, 8, 10, 12. All blood samples for pharmacokinetics and pharmacodynamics were centrifuged, and plasma samples obtained. Resulting plasma samples were transferred into a single polypropylene tube and frozen at approximately −70° C. or below. All samples were analyzed, and concentrations of IgG.IL2D49A.H1 and Proleukin® in plasma measured using immuno assays. Pharmacokinetic parameters such as half-life were calculated, and cells immunophenotyped by FACS for pharmacodynamics. The IL-2/IL-2 Gyros assay protocol is as follows. Each sample was run in duplicate, with each of the duplicated analyses requiring 5 μL of sample that had been diluted 1:20. Capture antibody is goat anti-human IL-2 biotinylated antibody (R&D Systems BAF202) and detected with Alexa 647 anti-human IL-2, Clone MQ1-17H12 (Biolegend 500315) LOQ: 0.08 ng/ml, all immunoassay were conducted using a Gyrolab Bioaffy200® with Gyros CD-200s®.

[0390] FIG. 23 shows the contrasts between IgG.IL2D49A.H1 and Proleukin®. IgG.IL2D49A.H1 has a half-life of 12 hours, whereas Proleukin® has a half-life of 3 hours. With the extended half-life of IgG.IL2D49A.H1 comes increased Treg activity and much reduced eosinophilia toxicity.

### Example 17: IgG.IL2D49A.H1 Shows an Extended Half-Life Over Proleukin®

[0391] IgG.IL2D49A.H1 showed a half-life of approximately 12 hours compared to the Proleukin® half-life of 4 hours after a single administration. Naïve CD-1 animals were dosed intravenously or subcutaneously and blood collected from all animals at pre-dose, 1 hour, 3, 7, 24, 31, 48, 55 and 72 hours post-dose. Blood samples were centrifuged, and plasma samples obtained. Resulting plasma samples were transferred into a single polypropylene tube and frozen at −80° C. All samples were analysed, and concentrations of IgG.IL2D49A.H1 in plasma was measured using immunoassays. The IL-2/IL-2 Gyros assay protocol is as follows. Each sample was run in duplicate, with each of the duplicated analyses requiring 5 μL of sample that had been diluted 1:20. Capture antibody is goat anti-human IL-2 biotinylated antibody (R&D Systems BAF202) and detected with Alexa 647 anti-human IL-2, Clone MQ1-17H12 (Biolegend 500315) LOQ: 0.08 ng/ml, all immunoassay were conducted using a Gyrolab Bioaffy200® with Gyros CD-200s®. This assay expands upon the half-life determination of Example 16. The results of this assay is shown in FIG. 24, where the half-life of IgG.IL2D49A.H1 is determined to be 12-14 hours, in contrast with Proleukin® which has a half-life of 4 hours.

### Example 18: Human Tregs Expand but not Teffectors or NK Cells in Mice with Xeno-GvHD

[0392] IgG.IL2D49A.H1 selectively expands Tregs over Teffectors or NK cells in the xeno-GvHD model, while Proleukin® does not. NOD-scid IL2R gamma null mice (NSG) were injected with hPBMCs from healthy donors via intraperitoneal injection (HemaCare Corp). 24 hours after injection, the animals were dosed with either IgG.IL2D49A.H1 1×/week or Proleukin® 5×/week every week for the duration of the study. Body weight was monitored twice a week for the duration of the study. Four mice per group were harvested 28 days after the first dose, and spleens were processed to obtain single cell suspensions and washed in RPMI (10% FBS). Red blood cells were lysed with Red Blood Cell Lysis Buffer and cells counted for cell number and viability. FACS staining was performed under standard protocols using FACS buffer (1×PBS+0.5% BSA+0.05% sodium azide). Cells were stained with surface antibodies and subsequently fixed/permeabilized and stained for FoxP3 according to the Anti-Mouse/Rat FoxP3 Staining Set PE (Ebioscience #72-5775). Cells were analyzed on the BD LSR Fortessa® and data analyzed with FlowJo® software. Fold values and ratios are based on the relative number calculated from each spleen absolute number. FIG. 25 shows that IgG.IL2D49A.H1 expands Treg cells much better than Proleukin® in this mouse model and also reduces the undesired expansion of Tcons and NK cells.

[0393] When the xeno-GvHD mice were treated with the IgG.IL2D49.H1, and injected with human PBMCs (the foreign cells), they maintained a normal body weight over the course of the treatment. In contrast, mice treated with Proleukin® had severe body weight loss. Body weight was monitored twice a week for the duration of the study, and percent body weight was calculated taking into consideration the initial weight of the animals at the time of enrollment. This improvement is associated with the effect IgG.IL2D49A.H1 has on Treg enhancement in this model, and the data is shown graphically in FIG. 26. This data indicates that IgG.IL2D49A.H1 and other antibody cytokine engrafted proteins have a greater therapeutic index and margin for safety.

### Example 19: IgG.IL2D49A.H1 Prevents Type 1 Diabetes Development in a NOD Mice Model of Diabetes

[0394] The non-obese diabetic (NOD) mouse develops type 1 diabetes spontaneously and is often used as an animal model for human type 1 diabetes. Pre-diabetic NOD females were administered equimolar Proleukin® (3× weekly) and IgG.IL2D49A.H1 (lx/weekly) by intraperitoneal injection. For the duration of the study (4 months after first dose), the mice were monitored twice a week for blood glucose and body weight. FIG. 27 shows that IgG.IL2D49A.H1 treated mice maintain a low blood glucose value. As such, mice treated with IgG.IL2D49A.H1 did not progress to overt Type 1 diabetes (T1D). In contrast, Proleukin® treated mice began with low blood glucose values, but this increased over time and resulted in type 1 diabetes symptoms.

### Example 20: IgG.IL2D49A.H1 Versus Low Dose Proleukin® in Pre-Diabetic NOD Mice

[0395] IgG.IL2D49A.H1 showed superior Treg expansion, better tolerability and no adverse events with one dose, compared to 3 doses of Proleukin® in the NOD mouse model. Pre-diabetic NOD females were administered low dose equimolar Proleukin® (3× weekly) and IgG.IL2D49A.H1 (lx/weekly) by intraperitoneal injection. Four mice per group were taken down 4 days after the first dose, and spleens were processed to obtain single cell suspensions and washed in RPMI (10% FBS). Red blood cells were lysed with Red Blood Cell Lysis Buffer and cells counted for cell number and viability. FACS staining was performed under standard protocols using FACS buffer (1×PBS+0.5% BSA+0.05% sodium azide). Cells were stained with surface antibodies: Rat anti-mouse CD3-BV605 (BD Pharmingen #563004), Rat anti-mouse CD4-Pacific Blue (BD Pharmingen #558107), Rat antimouse CD8-PerCp (BD Pharmingen #553036), CD44 FITC (Pharmingen #553133) Rat anti-mouse CD25-APC (Ebioscience #17-0251), and subsequently fixed/permeabilized and stained for FoxP3 according to the Anti-Mouse/Rat FoxP3 Staining Set PE (Ebioscience #72-5775). Cells were analyzed on the BD LSR Fortessa® or BD FACS LSR II®, and data analyzed with FlowJo® software. Fold values and ratios are based on the relative number calculated from each spleen absolute number. Administration of a single dose of IgG.IL2D49A.H1 showed greater expansion of Tregs than repeated administration of Proleukin® in the NOD mouse model as shown in FIG. 28.

### Example 21: Pharmacokinetics of an Efficacious Dose of IgG.IL2D49A.H1 in the NOD Mouse Model

[0396] Pharmacokinetics of IgG.IL2D49A.H1 at 1.3 mg/kg and 0.43 mg/kg was assayed in plasma up to 48 hours after 1 dose. Pre-diabetic 10 week old NOD mice were dosed intraperitoneally with IgG.IL2D49A.H1 at two different concentrations and blood collected from all animals at 1 hour, 3, 7, 24 and 48 hours post-dose. Blood samples were centrifuged, and plasma samples obtained. Resulting plasma samples were transferred into a single polypropylene tube and frozen at −80° C. Each sample was analyzed to detect IgG.IL2D49A.H1 plasma concentrations using three different methods adapted to the Gyros platform: 1) IL2-based capture and detect, 2) IL2-based capture and hFc-based detect, and 3) hFc-based capture and detect.

[0397] Each sample was run in duplicate, with each of the duplicated analyses requiring 5 μL of sample that had been diluted 1:20. The Gyros IL-2/IL-2 assay uses a capture goat anti-human IL-2 biotinylated antibody (R&D Systems BAF202) and detects with Alexa 647 anti-human IL-2, Clone MQ1-17H12 (Biolegend 500315). For IL-2/Fc detection, a capture goat anti-human IL-2 biotinylated antibody (R&D Systems BAF202) is used, and for detection, an Alexa 647 goat anti-human IgG, Fc specific (Jackson ImmunoResearch 109-605-098) antibody. For the human Fc/Fc assay, a capture Biotinylated goat anti-human IgG, Fc specific (Jackson ImmunoResearch #109-065-098) was used. The detection step used an Alexa 647 goat anti-human IgG, Fcγ specific (Jackson ImmunoResearch #109-605-098). All immunoassays were conducted using a Gyrolab Bioaffy200® with Gyros CD-200s. The limit of quantification (LOQ) in this mouse model is 48 hours as shown in FIG. 29. This is compared with Proleukin® and an IL2-Fc fusion protein in FIG. 30. This graph shows that the LOQ is higher for antibody cytokine engrafted proteins such as IgG.IL2D49.H1.

### Example 22: Dose Range Finding in Pre-Diabetic NOD Mice

[0398] IgG.IL2D49A.H1 showed superior Treg expansion over both CD4 Tcon and CD8 Teffectors when compared to Proleukin® at the same equimolar concentrations. Adverse events such as mortality were found in the highest Proleukin® groups, and no mortality was seen in mice treated with any dose of IgG.IL2D49.H1.

[0399] Pre-diabetic NOD females were administered low dose equimolar IL-2 (3× weekly) and IgG.IL2D49A.H1 (lx/weekly) by intraperitoneal injection. Three mice per group were euthanized 8 days days after the first dose and spleens harvested. Spleens were processed to obtain single cell suspensions and washed in RPMI (10% FBS). Blood was collected, red blood cells were lysed with Red Blood Cell Lysis Buffer and cells counted for cell number and viability. FACS staining was performed under standard protocols using FACS buffer (1×PBS+0.5% BSA+0.05% sodium azide). Cells were stained with surface antibodies and subsequently fixed/permeabilized and stained for FoxP3 according to the Anti-Mouse/Rat FoxP3 Staining Set PE (Ebioscience #72-5775). Cells were analyzed on the BD LSR Fortessa® and data analyzed with FlowJo® software. Ratios are based on the relative cell number calculated from each spleen. This data is provided in FIG. 31. The table provides for a dose range format for antibody cytokine engrafted proteins. It also demonstrates that IgG.IL2D49A.H1 had a greater therapeutic index than Proleukin® as dosing was well tolerated over a larger range. In contrast, the administration of Proleukin® at higher doses produced morbidity and mortality in the mice.

### Example 23: STAT5 Signaling on Human PBMC

[0400] IgG.IL2D49A.H1 was selective for Treg activation over Tcon and NK in healthy donor human PBMC as well as in PBMC from autoimmune donors. Potency of STAT5 signaling was reduced in Tcon but not Tregs after treatment in vitro with IgG.IL2D49.H1. Human PBMC from healthy and autoimmune patients (Hemacare Corp) cells were rested in serum-free test media, and added to each well. IgG.IL2D49A.H1 was added to the wells, and incubated for 20 min at 37° C. After 20 minutes, cells were fixed, stained with surface markers, permeabilized and stained with STAT5 antibody (BD Biosciences) following manufacturer's instructions. Cells were analyzed on the BD LSR Fortessa® and data analyzed with FlowJo® software. The data in FIG. 32 indicates that IgG.IL2D49A.H1 treatment of PBMCs taken from human patients with vitiligo that there was very little activation of NK, CD4 T con, or CD8 T effector cells, while maintaining Treg activity. This result was also observed in PBMCs taken from patients with SLE and Hashimoto's disease (data not shown). FIG. 33 shows that PBMCs taken from human patients with Type 1 Diabetics (T1D) and treated with IgG.IL2D49A.H1 and Proleukin® had much reduced pSTAT5 activity on NK cells, CD8 T effector cells or CD4 Tcon cells. As IgG.IL2D49A.H1 treatment was effective in normal PBMCs and well tolerated in PBMCs taken from T1D patients, this indicates that antibody cytokine proteins would be useful in the treatment of T1D even if the patient is receiving insulin therapy. This indicates that IgG.IL2D49A.H1 would be well tolerated in patients with these immune related disorders, and is effective in dealing with these immune related disorders.

### Example 24: Binding of Antibody Cytokine Engrafted Proteins

[0401] Antibody cytokine engrafted proteins were prepared using a variety of known immunoglobulin sequences which have been utilized in clinical settings as well as germline antibody sequences. One of the antibodies used has RSV as its antigen. To determine if engrafting IL2 into the CDRs of this antibody reduced or abrogated binding to RSV, an ELISA assay was run on RSV proteins either in PBS or a carbonate buffer. As shown in FIG. 34, this appears to be influenced by which CDR was chosen for IL2 engrafting. For example, IgG.IL2D49A.H1 has RSV binding similar to the ungrafted (un-modified) original antibody. In contrast, engrafting IL2 into the light chain of CDR3 (CDR-L3) or into CDR-H3 reduces binding. As expected, IL2 engrafted into a GFTX antibody scaffold which targets IgE produces no binding. This demonstrates that antibody cytokine engrafted proteins can retain binding to the original target of the antibody scaffold, or this binding can be reduced.

### Example 25: Treg Expansion in Non-Human Primates

[0402] IgG.IL2D49A.H1 was administered to cynomolgus monkeys in two single rising subcutaneous doses given with 4-week dosing free interval alternating between 2 dose groups (3M/group). This was followed by a 2-week multiple dose phase in two groups (3M/group) receiving 6 subcutaneous doses (every other day for two weeks) of buffer or 5 mg/kg IgG.IL2D49A.H1. Changes in lymphocyte populations assessed by flow cytometry (immunophenotyping) from the “single dose phase” (two doses given 29 days apart) are shown in FIG. 35. At the 125 and 375 μg/kg doses, 3-4 fold and up to 5.5 fold increases in absolute numbers of Treg were observed without any apparent effect on Tcon or NK cells. Maximum Treg expansion was seen on day 4 and Treg numbers return to near baseline by day 10. IgG.IL2D49A.H1 was safe and well tolerated and there were no mortalities, clinical signs or changes in body weight, food consumption, cytokine levels or clinical pathology. Furthermore no cardiovascular effects (ECG or blood pressure) were observed in the study after single dose up to 2.4 mg/kg or multiple dosing every other day for two weeks at 5 mg/kg. There was no indication of vascular leak or other CV related findings.

### Example 26: IgG.IL2R67A.H1 Activities and Extended Half-Life

[0403] IL2 containing either R67A or F71 A muteins were engrafted into all six CDRs, corresponding to LCDR-1, LCDR-2, LCDR-3 and HCDR-1, HCDR-2 and HCDR-3. From the Table in FIG. 36, it is apparent that the antibody cytokine engrafted proteins differ in their activities, including that IL2 engrafted into the light chain of CDR2 (GFTX3b-IL2-L2) did not express. It was also observed that IL2 when engrafted into HCDR1 with altered Fc function (e.g. Fc silent) had a better biological result on the expansion CD8+T effectors.

[0404] For a half-life determination, naïve CD-1 mice were dosed I.P. and blood collected from all animals at pre-dose, 1 hour, 3, 7, 24, 31, 48, 55 and 72 hours post-dose. Blood samples were centrifuged, and plasma samples obtained. Resulting plasma samples were transferred into a single polypropylene tube and frozen at −80° C. All samples were analyzed, and concentrations of IgG.IL2R67A.H1 in plasma measured using immuno-assays. Pharmacokinetic parameters such as half-life were calculated. Each sample was run in duplicate, with each of the duplicated analyses requiring 5 μL of sample that had been diluted 1:20. Capture: goat anti-human IL-2 biotinylated antibody (R&D Systems BAF202) Detect: Alexa 647 anti-human IL-2, Clone MQ1-17H12 (Biolegend 500315) All immunoassay were conducted using a Gyrolab® Bioaffy200 with Gyros CD-200s. As shown in the graph in FIG. 37, the half-life of IgG.IL2R67A.H1 is approximately 12 hours and then diminishing over the next 48 hours. The Proleukin® half-life could not be shown on this graph as its half-life is approximately 4 hours.

### Example 27: IgG.IL2R67A.H1 Selectively Expands CD8 T Effectors and is Better Tolerated than IL-2 Fc or Proleukin® in Normal B6 Mice

[0405] IgG.IL2R67A.H1 augments CD8 T effectors over Tregs without causing the adverse events seen with Proleukin® administration. After dosing mice on day 1, CD8 T effector expansion was monitored at day 4, day 8 and day 11. At each timepoint, the CD8 T effector cell population was greatly expanded, without Treg expansion. This was in contrast to Proleukin® and an IL-2Fc fusion, in which mortality and morbidity were observed at equimolar doses of IL-2.

[0406] B6 female mice were administered Proleukin® (5× weekly), IL-2 Fc and IgG.IL2R67A.H1 (1×/week) at equimolar concentrations. Eight days after first treatment, spleens were processed to obtain a single cell suspension and washed in RPMI (10% FBS). Red blood cells were lysed with Red Blood Cell Lysis Buffer (Sigma #R7757) and cells counted for cell number and viability. FACS staining was performed under standard protocols using FACS buffer (1×PBS+0.5% BSA+0.05% sodium azide). Cells were stained with surface antibodies: Rat anti-mouse CD3-efluor 450 (Ebioscience #48-0032), Rat anti-mouse CD4-Pacific Blue (BD Pharmingen #558107), Rat anti-mouse CD8-PerCp (BD Pharmingen #553036), Rat anti-mouse CD44 FITC (Pharmingen #553133), Rat anti-mouse CD25-APC (Ebioscience #17-0251), Rat anti-mouse Nk1.1 (Ebioscience #95-5941) and subsequently fixed/permeabilized and stained for FoxP3 according to the anti-Mouse/Rat FoxP3 Staining Set PE (Ebioscience #72-5775). Cells were analyzed on the Becton-Dickinson LSR Fortessa® or Becton-Dickinson FACS LSR II®, and data analyzed with FlowJo® software.

[0407] FIGS. 38A-38C show the preferential expansion of CD8 T effector cells in B6 female mice after administration of Proleukin® (5× weekly), IL2-Fc and IgG.IL2R67A.H1 (1×/week) at Proleukin® equimolar concentrations (IgG.IL2R67A.H1/IL2-Fc 100 μg˜1 nmol IL2 equivalent). The data in the graphs demonstrate that CD8 T effector cells proliferate without similar proliferation of Tregs. Contrast this data to Proleukin® which expanded both CD8 T effectors and Tregs. Note that IgG.IL2R67A.H1 was superior in both absolute numbers of CD8 T effector cell expansion and in the ratio CD8 T effector cells:Tregs to an IL2-Fc fusion construct, demonstrating that there is a structural and functional basis for the IgG.IL2R67A.H1 construct. FIGS. 38D-38F show that the beneficial effect of IgG.IL2R67A.H1 is more apparent at higher doses. When 500 μg (5 nmol IL2 equivalent) of IgG.IL2R67A.H1 was administered to B6 mice, the preferential expansion of CD8 T effector cells was seen relative to Treg cells similar to the lower dose. However, in the IL2-Fc treatment group, mice were found dead after only a single dose at the higher level (data not shown). This indicates that IgG.IL2R67A.H1 has a larger therapeutic index than that of IL2-Fc fusion constructs, and can be safely administered in a wider dosage range.

### Example 28: IgG.IL2R67A.H1 Selectively Expands CD8 T Effector Cells, and is Better Tolerated than Proleukin® in NOD Mice

[0408] The non-obese diabetic (NOD) mouse develops type 1 diabetes spontaneously and is often used as an animal model for human type 1 diabetes. Using the same protocol for the B6 mice described in Example 27, IgG.IL2R67A.H1, IL2-Fc and Proleukin® were administered to NOD mice at Proleukin® equimolar equivalents. Again, administration of IgG.IL2R67A.H1 at this dose preferentially expanded CD8 T effector cells over Tregs as shown in the graph in FIG. 39A. In addition, administration of IgG.IL2R67A.H1 showed no adverse events in NOD mice, while the Proleukin® treated group had 5 moribund mice and 2 deaths. FIG. 39B is a graph reporting the dosages, fold cellular changes and cell type from the NOD mouse model.

### Example 29: IgG.IL2R67A.H1 Shows Single-Agent Efficacy in a CT26 Colon Tumor Mouse Model

[0409] After studying the safety of IgG.IL2R67A.H1, its single-agent efficacy was tested in a CT26 mouse model. The murine CT26 cell line is a rapidly growing grade IV colon carcinoma cell line, used in over 500 published studies and is one of the commonly used models in drug development.

[0410] CT26 (ATCC CRL-2638) cells were grown in sterile conditions in a 37° C. incubator with 5% CO₂. The cells were cultured in RPMI 1640 media supplemented with 10% FBS. Cells were passed every 3-4 days. For the day of injection, cells were harvested (Passage 11) and re-suspended in HBSS at a concentration of 2.5×10⁶/ml. Cells were Radil tested on for mycoplasma and murine viruses. Balbc mice were used. For each mouse, 0.25×10⁶ cells were implanted with subcutaneously injection into right flank using a 28g needle (100 μl injection volume). After implantation, animals were calipered and weighed 3 times per week once tumors were palpable. Caliper measurements were calculated using (L×W×W)/2. Mice were fed with normal diet and housed in SPF animal facility in accordance with the Guide for Care and Use of Laboratory Animals and regulations of the Institutional Animal Care and Use Committee.

[0411] When tumors reached about 100 mm³, mice were administered by intraperitoneal route 12.5-100 μg of IgG.IL2R67A.H1. Tumors were measured twice a week. Average tumor volumes were plotted using Prism 5 (GraphPad®) software. An endpoint for efficacy studies was achieved when tumor size reached a volume of 1000 mm³. Following injection, mice were also closely monitored for signs of clinical deterioration. If for any reason mice showed any signs of morbidity, including respiratory distress, hunched posture, decreased activity, hind leg paralysis, tachypnea as a sign for pleural effusions, weight loss approaching 20% or 15% plus other signs, or if their ability to carry on normal activities (feeding, mobility), was impaired, mice were euthanized.

[0412] IgG.IL2R67A.H1 was efficacious in the CT26 mouse model at doses ranging from 12.5 μg to 100 μg, with 4 administrations of IgG.IL2R67A.H1 over 17 days in a 20 day study. The tumor volume curves shown in FIG. 40 are indicative of the efficacy of IgG.IL2R67A.H1 in this study, as tumor volumes were kept under 200 mm for 15 days and then under 400 mm for the remaining 5 days.

### Example 30: IgG.IL2R67A.H1 and Additional Cancer Therapeutics Show Efficacy in a B16 Mouse Model

[0413] To assess the efficacy of IgG.IL2R67A.H1 in combination with other cancer therapeutics, a B16F10 melanoma mouse model was used. B16F10 cells (ATCC CRL-6475) were grown in sterile conditions in a 37° C. incubator with 5% CO₂ for two weeks. B16F10 cells were cultured in DMEM+10% FBS. Cells were harvested and re-suspended in FBS-free medium DMEM at a concentration of 1×10⁶/100 μl. B16F10 cells were Radil tested for mycoplasma and murine viruses. Cells were implanted into the right flank of B6 mice using a 28 gauge needle (100 μl injection volume). After implant, mice were calipered and weighed 2 times per week once tumors were palpable. Caliper measurements were calculated using (L×W×W)/2.

[0414] In this study, IgG.IL2R67A.H1 was used as a single agent or in combination with the TA99 antibody, an anti-Trp1 antibody, with Trp1 expressed at high levels on B16F10 cells. An IL2-Fc fusion was administered as a single agent or in combination with the TA99 antibody. As a control, the TA99 antibody was administered as a single agent.

[0415] Surprisingly, IgG.IL2R67A.H1 when administered as a single agent at a 500 μg dose was the most efficacious treatment in this model (FIG. 41). The next best treatment was the combination of IgG.IL2R67A.H1 (100 μg) and TA99. This combination was more efficacious than IgG.IL2F71A.H1 as a single agent at 100 μg, TA99 in combination with IgG.IL2F71A.H1 at 500 μg and IL2-Fc as a single agent or as an IL2-Fc/TA99 combination. When TA99 was administered a single agent, it had no effect, and the mean tumor volume was similar to untreated control. This data demonstrates that IgG.IL2R67A.H1 is efficacious as a single agent in melanoma mouse tumor model, but it is also efficacious when paired with another anti-cancer agent.

### Example 31: Activity of IgG.IL2R67A.H1 and IgG.IL2F71A.H1 in Human Cells

[0416] In order to test the activity of IgG.IL2R67A.H1 on human CD8 T effectors, human peripheral blood mononuclear cells (PBMC) were assayed for pSTAT5 activity. PBMC cells were rested in serum-free test media, and plated. IgG.IL2R67A.H1, IgG.IL2F71A.H1 or Proleukin® was added to the PBMCs, and incubated for 20 minutes at 37° C. After 20 min, cells were fixed with 1.6% formaldehyde, washed and stained with surface markers. After 30 minutes at room temperature, samples were washed and re-suspended cell pellets were permeabilized with −20° C. methanol, washed and stained for pSTAT5 and DNA intercalators. Cells were run on Cytof® and data analyzed with FlowJo™ software to quantify the level of pSTAT5 activity. The table in FIG. 42 demonstrates the preferential activation IgG.IL2R67A.H1 has for human CD8 T effector cells and minimizes the activation of Treg cells.

### Example 32: Binding of Antibody Cytokine Engrafted Proteins

[0417] Antibody cytokine engrafted proteins were prepared using a variety of known immunoglobulin sequences which have been utilized in clinical settings as well as germline antibody sequences. One of the antibodies used has RSV as its antigen. To determine if engrafting IL2 into the CDRs of this antibody reduced or abrogated binding to RSV, an ELISA assay was run on RSV proteins either in PBS or a carbonate buffer. As shown in FIG. 43, this appears to be influenced by which CDR was chosen for IL2 engrafting. For example, IgG.IL2R67A.H1 has RSV binding similar to the un-grafted (un-modified) original antibody. In contrast, engrafting IL2 into the light chain of CDR3 (CDR-L3) or into CDR-H3 reduces binding. As expected, IL2 engrafted into a GFTX antibody scaffold which targets IgE produces no binding. This demonstrates that antibody cytokine engrafted proteins can retain binding to the original target of the antibody scaffold, or this binding can be reduced.

### Example 33: In Vitro Activity of IL-6 Antibody Cytokine Engrafted Proteins in Human PBMCs

[0418] CyTOF, a FACS based method that combines mass cytometry, incorporates flow cytometry technology with a time-of-flight inductively coupled plasma mass spectrometry (ICP-MS). It allows for the simultaneous detection and quantification of over 40 parameters from a single cell. It utilizes rare-earth metal conjugated monoclonal antibodies to specific cell surface or intracellular molecules. Using CyTOF, in vitro signaling studies were performed on IL-6 antibody cytokine engrafted proteins in human PBMCs assessed by pSTAT1, pSTAT3, pSTAT4, and pSTAT5 detection.

[0419] Human PBMCs were treated with an isotype control, IL-6 grafts (IgG.IL-6.L2, IgG.IL-6.L3, IgG.IL-6.H2 and IgG.IL-6.H3), or native IL-6 at molar equivalents of IL-6 for 30 minutes. The cells were fixed with 1.6% PFA to preserve phosphorylation status on signaling molecules. The cells were then stained with a combination of cell surfaces receptors for specific lineages and intracellular signaling molecules of the JAK/Stat pathway. The samples were then acquired and analyzed on the CyTOF. Results indicate that the IL-6 grafts have similar bioactivity as native IL-6 (FIG. 44). They also signal on similar cell populations (CD8 and CD4 T cells) and through the same JAK/Stat pathways.

### Example 34: In Vivo Activity of IL-6 Antibody Cytokine Engrafted Proteins in C57B16 DIO Mice

[0420] CyTOF analysis was also run on immune cells in mice. For the mouse in vivo studies, C57/B16 DIO mice were dosed once subcutaneously with 5 mg/kg of IgG.IL-6.L3, IgG.IL-6.H2 and IgG.IL-6.H3 and compared to a naïve mouse. Whole blood was collected at 2 post dose and fixed with 1.6% PFA to preserve phosphorylation status on signaling molecules. The cells were then stained with a combination of cell surfaces receptors for specific lineages and intracellular signaling molecules of the JAK/Stat pathway. The samples where then acquired and analyzed on the CyTOF.

[0421] As shown in the graphs in FIG. 45, IL-6 antibody cytokine engrafted proteins stimulated both CD8 and CD4 T cells as measured by pSTAT1, and pSTAT3 levels. Stimulation of monocytes was also observed as measured by pSTAT3 levels.

### Example 35: Pharmacokinetics and Pharmacodynamics Evaluation of IL-6 Antibody Cytokine Engrafted Proteins

[0422] Half-life of the antibody cytokine engrafted proteins was assessed in C57Bl/6 DIO mice. Antibody cytokine engrafted proteins were injected at 0.5, 2, 5 and 10 mg/kg (10 ml/kg dose volume) in 0.9% saline subcutaneously and blood was sampled beginning at 2 hours post-injection and up to 240 hours post-injection. Whole blood was collected into heparin-treated tubes at each time point and centrifuged at 12,500 rpm for 10 minutes at 4° C. Plasma supernatant was collected and stored at −80° C. until all time points were collected. Antibody cytokine engrafted proteins levels in plasma were measured using three different immunoassay methods to enable detection of both the IL-6 and antibody domains of the antibody cytokine engrafted protein. The first assay consisted of an in-house biotin labelled goat anti-human IL-6 capture (R&D Systems AF-206-NA) and alexafluor 647 goat anti-human IgG, Fcγ specific detection (Jackson ImmunoResearch #109-605-098). The second assay consisted of a biotinylated goat anti-human IgG, Fcγ specific detection (Jackson ImmunoResearch #109-065-098) and alexafluor 647 goat anti-human IgG, Fcγ specific detection (Jackson ImmunoResearch #109-605-098). And the third assay consisted of an in-house biotin labelled goat anti-human IL-6 capture (R&D Systems AF-206-NA) and in-house alexafluor 647 labelled anti-human IL-6 detection (R&D Duoset DY206-05 Part #840113). All three assays were run on the GyroLab® xP Workstation (Gyros AB Uppsala, Sweden). The assay was run on 200 nL CDs (Gyros #P0004180) using a Gyros-approved wizard method. The buffers used were Rexxip A® (Gyros #P0004820) for standard and sample dilution and Rexxip F® (Gyros #P0004825) for detection preparation. Analysis of results was done using the Gyrolab® data analysis software. As shown in FIG. 46A-B, IgG.IL-6.H2 and IgG.IL-6.H3 shows a half-life of 12-14 hours, both longer than native IL-6.

[0423] Consistent with the extended half-life, antibody cytokine engrafted proteins also demonstrated improved pharmacodynamics. Phospho-stat3 (pSTAT3), a marker of IL-6 activation was monitored in target tissues (muscle and fat) after subcutaneous dosing. Antibody cytokine engrafted protein IgG.IL-6.H2 was injected at 0.1 (10 ml/kg dose volume) in 0.9% saline subcutaneously. Terminal quadriceps muscle and gonad fat (1 cm each) were harvested at 4 hours post-injection. Muscle and fat tissue was collected in tubes containing 500 μl MSD Lysis Buffer (Meso Scale Discovery, #K150SVD-2, Lot #Z0055522) and a steel bead (Qiagen, #69989). Tissues were homogenized by tissue-lyser at 30 rps for 5 minutes at room temperature. Lysed tissue was centrifuged for 10 minutes at 14,000×g at 4° C. Supernatant was collected and stored on ice until phospho-STAT3 assay.

[0424] A phospho-Stat3 assay plate (Meso Scale Discovery® pSTAT3(Tyr705) Assay) was run on the same day as tissue collection and processing. Tissue supernatant protein detection was performed using the Bradford Assay (Pierce). Protein was then plated on the phospho-STAT3 assay plate at 50 μl/well. Plates were incubated at room temperature for 2 hours, washed, and treated with phospho-STAT3 or Total STAT3 antibody (Meso Scale Discovery). Plates were analysed for relative fluorescence units (RFU) on the MSD Sector Imager 2400 (Meso Scale Discovery). Protein phospho-STAT3 RFU was normalized to loaded protein concentration. Enhanced pSTAT3 signal is detected in fat tissue, but not muscle at 4 hours post dose (FIG. 47).

### Example 36: In Vivo Activity of IL-6 Antibody Cytokine Engrafted Proteins in C57B16 DIO Mice

[0425] A dose response of efficacy for two of the grafts was performed. In the experiment, C57/B16 DIO mice were dosed once per day subcutaneously with vehicle, 5, 10, or 20 mg/kg of both the H2 and H3 versions of the antibody IL-6 grafted protein. Whole blood was collected at 2, 6 and 24 hrs post-dose on day 1 and day 13. Whole blood was collected into heparin-treated tubes at each time point and centrifuged at 12,500 rpm for 10 minutes at 4° C. Plasma supernatant was collected and stored at −80° C. until all time points were collected. Samples were submitted for PK analysis as above. Body weights were taken every other day to monitor weight loss. Once a week NMR analysis was done to assess body mass composition as compared to naive normal diet control mice. On day 20, mice were dosed then fasted overnight. The following morning the received a glucose challenge (20% glucose 1 g/kg bolus). Mice were bled at 20, 40, 60 and 120 minutes after glucose dosing and blood glucose levels were measured on a glucometer.

[0426] Rapid loss of body weight and fat mass is noted with both grafts and all dose levels (FIGS. 48A and 48B). Less pronounced effect on lean fraction, with possible dose response (FIG. 48C). Effect on lean mass appears to decrease over time, whereas effect on fat loss persists.

### Example 37: In Vivo Activity of IL-6 Antibody Cytokine Engrafted Proteins on Respiratory Exchange Ratio (RER) in C57B16 DIO Mice

[0427] A study was designed to test the effect of antibody cytokine engrafted protein IgG.IL-6.H3 on respiratory exchange ratio. C57/B16 DIO mice were dosed once per day subcutaneously with vehicle or 5 mg/kg of the H3 version of the antibody IL-6 grafted protein. Dosing was performed on days 1-3 and 5-7 of the experiment, while 02 consumption, and CO₂ production were assessed in Oxymax indirect calorimetry cages in 48 hours increments on days −1-1, 3-5 and 7-9, during which time mice remained undisturbed. Body weights were taken every other day to monitor weight loss. Respiratory exchange ratio (RER) was calculated from measured 02 consumption and CO₂ production.

[0428] Pre-dosing RER was equivalent between experimental cohorts (FIG. 49A). By contrast, at days 3-5, a clear decrease in RER was noted in the H3 graft dosed animals relative to vehicle controls, indicative of a shift towards fat utilization (FIG. 49B). This difference normalized by 7-9 (FIG. 49C).

### Example 38: In Vivo Activity of IL-6 Antibody Cytokine Engrafted Proteins on Food Intake in Pair Fed C57B16 DIO Mice

[0429] A study was designed to test the effect of antibody cytokine engrafted protein IgG.IL-6.H3 on food intake in a pair feeding model. C57/B16 DIO mice were dosed once per day subcutaneously with vehicle or 5 mg/kg of the H3 version of the antibody IL-6 grafted protein. Food intake was assessed by weighing food at beginning of study and twice daily thereafter. The pair fed group received as much food as the dosed group consumed each morning and afternoon, starting on the second day of dosing. NMR analysis was done on days 1, 3, 5, and 7 of dosing to assess body mass composition.

[0430] H3 antibody graft dosed animals demonstrated rapid weight reduction, reaching ˜15% body weight loss by day 6 of treatment (FIG. 50A). This effect was accompanied by a significant reduction in food intake, which reached nadir at day 3 of dosing, with subsequent gradual increase to baseline levels of food consumption (FIG. 50B). Pair fed animals demonstrated a degree of weight loss similar to the H3 graft dosed animals, indicating that the weight loss induced by grafted antibody treatment largely reflects a decrease in food intake (FIG. 50A). The loss of body weight in both the H3 antibody graft dosed animals and in pair fed animals was accompanied by ˜30-40% decrease in overall fat mass at day 7 (FIG. 50C); by contrast, lean mass was reduced significantly in pair fed but not H3 antibody graft dosed animals (FIG. 50D). Weight of the isolated tibialis anterior muscle was not significantly decreased in either H3 antibody graft dosed or pair-fed animals (FIG. 50E).

### Example 39: Creation of IL10 Antibody Cytokine Engrafted Proteins

[0431] IL10 ACE proteins were generated by engineering a monomeric IL10 sequence into CDR regions of various immunoglobulin scaffolds, then both heavy and light chain immunoglobulin chains were produced to generate final protein constructs. IL10 ACE proteins confer preferred therapeutic anti-inflammatory properties of IL10; however, IgGIL10M engrafted constructs have reduced proportional pro-inflammatory activity as compared with rhIL10.

[0432] To create antibody cytokine engrafted proteins, monomeric IL10 (IL10M), comprising residues 19-178 of full length IL10 with a six amino acid linker between residues 134 and 135 was inserted into various CDR loops of immunoglobulin chain scaffold. Engrafted constructs were prepared using a variety of known immunoglobulin sequences which have been utilized in clinical settings as well as germline antibody sequences. Sequences of IL10M in two exemplary scaffolds, referred to as GFTX and GFTX3b, with the GFTX ACE proteins listed in TABLE 2 and the GFTX3b proteins listed in TABLE 3. Insertion points were selected to be the mid-point of the CDR loop based on available structural or homology model data. Antibody cytokine engrafted proteins were produced using standard molecular biology methodology utilizing recombinant DNA encoding the relevant sequences.

[0433] For example, a variable region of each antibody containing IL10M inserted into one of the six CDRs was synthesized. DNA encoding variable region was amplified via PCR and the resulting fragment was sub-cloned into vector containing either the light chain constant region or the heavy chain constant and Fc regions. In this manner IL10M antibody cytokine engrafted proteins were made corresponding to insertion of IL10M into each of the 6 CDRs (L1, L2, L3, H1, H2, H3). Resulting constructs are shown in TABLE 2 or TABLE 3. Transfections of the appropriate combination of heavy and light chain vectors results in the expression of a recombinant antibody with two grafted IL10M molecules (one IL10 monomer in each Fab arm).

[0434] The selection of which CDR is chosen for cytokine engraftment is chosen on the parameters of: the required biology, the biophysical properties and a favorable development profile. At this time, modeling software is only partially useful in predicting which CDR and which location within the CDR will provide the desired parameters, so therefore all six possible antibody cytokine grafts are made and then evaluated in biological assays. If the required biological activity was achieved, then the biophysical properties such as structural resolution of the antibody cytokine engrafted molecule were resolved.

[0435] By virtue of the grafting of IL10 into a CDR, the antibody portion of the antibody cytokine engrafted protein presents the IL10 monomer with a unique structure which influences the binding to the IL10 receptor as discussed below. There are no off-target effects due to the antibody portion. In addition, the Fc portion of the antibody cytokine engrafted protein has been modified to be fully silent regarding ADCC (Antibody Dependent Cell-mediated Cytotoxicity) and CDC (Complement-Dependent Cytotoxicity).

[0436] In summary, the insertion point in each CDR was chosen on a structural basis, with the hypothesis that grafting into the CDR would provide some level of steric hindrance to individual subunits of the IL10 receptor. The final selection of which CDR graft is best for a particular cytokine is based on desired biology and biophysical properties. The nature of the cytokine receptor, the cytokine/receptor interactions and the mechanism of signaling also played a role and this was resolved by comparing each individual antibody cytokine engrafted molecule for their respective properties. For example, engrafting of IL10 into the light chain CDR1 (CDRL1) produced the desired biological activity of activating monocytes but not other cells such as NK cells. This was seen in the exemplary antibody cytokine engrafted proteins IgGIL10M7 and IgGIL10M13.

TABLE 3

| SEQ ID NO: | Description | | Comments |
|---|---|---|---|
| 3817 | CDRH1 of | GFSLSTSGM | GFTX3b |
| | IgGIL10M7 | | |
| | (Chothia) | | |
| 3818 | CDRH2 of | WWDDK | GFTX3b |
| | IgGIL10M7 | | |
| | (Chothia) | | |
| 3819 | CDRH3 of | SMITNWYFDV | GFTX3b |
| | IgGIL10M7 | | |
| | (Chothia) | | |
| 3820 | CDRL1 of | QLSSPGQGTQSENSCTHFPGNLPNMLRDL | IL10 |
| | IgGIL10M7 | RDAFSRVKTFFQMKDQLDNLLLKESLLED | grafted |
| | (Chothia) | FKGYLGCQALSEMIQFYLEEVMPQAENQD | into |
| | | PDIKAHVNSLGENLKTLRLRLRRCHRFLP | CDRL1. |
| | | CENGGGSGGKSKAVEQVKNAFNKLQEKGI | IL10 is |
| | | YKAMSEFDIFINYIEAYMTMKIRNVGY | bolded, |
| | | | underlined |
| 3821 | CDRL2 of | DTS | GFTX3b |
| | IgGIL10M7 | | |
| | (Chothia) | | |
| 3822 | CDRL3 of | GSGYPF | GFTX3b |
| | IgGIL10M7 | | |
| | (Chothia) | | |
| 3823 | CDRH1 of | TSGMSVG | GFTX3b |
| | IgGIL10M7 | | |
| | (Kabat) | | |
| 3824 | CDRH2 of | DIWWDDKKDYNPSLKS | GFTX3b |
| | IgGIL10M7 | | |
| | (Kabat) | | |
| 3825 | CDRH3 of | SMITNWYFDV | GFTX3b |
| | IgGIL10M7 | | |
| | (Kabat) | | |
| 3826 | CDRL1 of | KAQLSSPGQGTQSENSCTHFPGNLPNMLR | IL10 |
| | IgGIL10M7 | DLRDAFSRVKTFFQMKDQLDNLLLKESLL | grafted |
| | (Kabat) | EDFKGYLGCQALSEMIQFYLEEVMPQAEN | into CDRL1. |
| | | QDPDIKAHVNSLGENLKTLRLRLRRCHRF | IL10 is |
| | | LPCENGGGSGGKSKAVEQVKNAFNKLQEK | bolded, |
| | | GIYKAMSEFDIFINYIEAYMTMKIRNVGY | underlined |
| | | MH | |
| 3827 | CDRL2 of | DTSKLAS | GFTX3b |
| | IgGIL10M7 | | |
| | (Kabat) | | |
| 3828 | CDRL3 of | FQGSGYPFT | GFTX3b |
| | IgGIL10M7 | | |
| | (Kabat) | | |
| 3829 | VH of | QVTLRESGPALVKPTQTLTLTCTFSGFSL | GFTX3b |
| | IgGIL10M7 | STSGMSVGWIRQPPGKALEWLADIWWDDK | |
| | | KDYNPSLKSRLTISKDTSANQVVLKVTNM | |
| | | DPADTATYYCARSMITNWYFDVWGAGTTV | |
| | | TVSS | |
| 3830 | VL of | DIQMTQSPSTLSASVGDRVTITCKAQLSS | IL10 |
| | IgGIL10M7 | PGQGTQSENSCTHFPGNLPNMLRDLRDAF | grafted |
| | | SRVKTFFQMKDQLDNLLLKESLLEDFKGY | into CDRL1. |
| | | LGCQALSEMIQFYLEEVMPQAENQDPDIK | |
| | | AHVNSLGENLKTLRLRLRRCHRFLPCENG | |
| | | GGSGGKSKAVEQVKNAFNKLQEKGIYKAM | |
| | | SEFDIFINYIEAYMTMKIRNVGYMHWYQQ | |
| | | KPGKAPKLLIYDTSKLASGVPSRFSGSGS | |
| | | GTAFTLTISSLQPDDFATYYCFQGSGYPF | |
| | | TFGGGTKLEIK | |
| 3831 | Heavy chain | QVTLRESGPALVKPTQTLTLTCTFSGFSL | GFTX3b |
| | of IgGIL10M7 | STSGMSVGWIRQPPGKALEWLADIWWDDK | |
| | | KDYNPSLKSRLTISKDTSANQVVLKVTNM | |
| | | DPADTATYYCARSMITNWYFDVWGAGTTV | |
| | | TVSSASTKGPSVFPLAPSSKSTSGGTAAL | |
| | | GCLVKDYFPEPVTVSWNSGALTSGVHTFP | |
| | | AVLQSSGLYSLSSVVTVPSSSLGTQTYIC | |
| | | NVNHKPSNTKVDKRVEPKSCDKTHTCPPC | |
| | | PAPELLGGPSVFLFPPKPKDTLMISRTPE | |
| | | VTCVVVDVSHEDPEVKFNWYVDGVEVHNA | |
| | | KTKPREEQYNSTYRVVSVLTVLHQDWLNG | |
| | | KEYKCKVSNKALPAPIEKTISKAKGQPRE | |
| | | PQVYTLPPSREEMTKNQVSLTCLVKGFYP | |
| | | SDIAVEWESNGQPENNYKTTPPVLDSDGS | |
| | | FFLYSKLTVDKSRWQQGNVFSCSVMHEAL | |
| | | HNHYTQKSLSLSPGK | |
| 3832 | Light chain | DIQMTQSPSTLSASVGDRVTITCKAQLSS | IL10 |
| | of IgGIL10M7 | PGQGTQSENSCTHFPGNLPNMLRDLRDAF | grafted |
| | | SRVKTFFQMKDQLDNLLLKESLLEDFKGY | into CDRL1. |
| | | LGCQALSEMIQFYLEEVMPQAENQDPDIK | |
| | | AHVNSLGENLKTLRLRLRRCHRFLPCENG | |
| | | GGSGGKSKAVEQVKNAFNKLQEKGIYKAM | |
| | | SEFDIFINYIEAYMTMKIRNVGYMHWYQQ | |
| | | KPGKAPKLLIYDTSKLASGVPSRFSGSGS | |
| | | GTAFTLTISSLQPDDFATYYCFQGSGYPF | |
| | | TFGGGTKLEIKRTVAAPSVFIFPPSDEQL | |
| | | KSGTASVVCLLNNFYPREAKVQWKVDNAL | |
| | | QSGNSQESVTEQDSKDSTYSLSSTLTLSK | |
| | | ADYEKHKVYACEVTHQGLSSPVTKSFNRG | |
| | | EC | |
| 3833 | CDRH1 of | GFSLSTSGM | GFTX3b |
| | IgGIL10M8 | | |
| | (Chothia) | | |
| 3834 | CDRH2 of | WWDDK | GFTX3b |
| | IgGIL10M8 | | |
| | (Chothia) | | |
| 3835 | CDRH3 of | SMITNWYFDV | GFTX3b |
| | IgGIL10M8 | | |
| | (Chothia) | | |
| 3836 | CDRL1 of | QLSVGY | GFTX3b |
| | IgGIL10M8 | | |
| | (Chothia) | | |
| 3837 | CDRL2 of | DTSPGQGTQSENSCTHFPGNLPNMLRDLR | GFTX3b |
| | IgGIL10M8 | DAFSRVKTFFQMKDQLDNLLLKESLLEDF | IL10 |
| | (Chothia) | KGYLGCQALSEMIQFYLEEVMPQAENQDP | grafted |
| | | DIKAHVNSLGENLKTLRLRLRRCHRFLPC | into CDRL2. |
| | | ENGGGSGGKSKAVEQVKNAFNKLQEKGIY | IL10 is |
| | | KAMSEFDIFINYIEAYMTMKIRNS | bolded, |
| | | | underlined |
| 3838 | CDRL3 of | GSGYPF | GFTX3b |
| | IgGIL10M8 | | |
| | (Chothia) | | |
| 3839 | CDRH1 of | TSGMSVG | GFTX3b |
| | IgGIL10M8 | | |
| | (Kabat) | | |
| 3840 | CDRH2 of | DIWWDDKKDYNPSLKS | GFTX3b |
| | IgGIL10M8 | | |
| | (Kabat) | | |
| 3841 | CDRH3 of | SMITNWYFDV | GFTX3b |
| | IgGIL10M8 | | |
| | (Kabat) | | |
| 3842 | CDRL1 of | KAQLSVGYMH | GFTX3b |
| | IgGIL10M8 | | |
| | (Kabat) | | |
| 3843 | CDRL2 of | DTSPGQGTQSENSCTHFPGNLPNMLRDLR | GFTX3b |
| | IgGIL10M8 | DAFSRVKTFFQMKDQLDNLLLKESLLEDF | IL10 |
| | (Kabat) | KGYLGCQALSEMIQFYLEEVMPQAENQDP | grafted |
| | | DIKAHVNSLGENLKTLRLRLRRCHRFLPC | into CDRL2. |
| | | ENGGGSGGKSKAVEQVKNAFNKLQEKGIY | IL10 is |
| | | KAMSEFDIFINYIEAYMTMKIRNSKLAS | bolded, |
| | | | underlined |
| 3844 | CDRL3 of | FQGSGYPFT | GFTX3b |
| | IgGIL10M8 | | |
| | (Kabat) | | |
| 3845 | VH of | QVTLRESGPALVKPTQTLTLTCTFSGFSL | GFTX3b |
| | IgGIL10M8 | STSGMSVGWIRQPPGKALEWLADIWWDDK | |
| | | KDYNPSLKSRLTISKDTSANQVVLKVTNM | |
| | | DPADTATYYCARSMITNWYFDVWGAGTTV | |
| | | TVSS | |
| 3846 | VL of | DIQMTQSPSTLSASVGDRVTITCKAQLSV | GFTX3b |
| | IgGIL10M8 | GYMHWYQQKPGKAPKLLIYDTSPGQGTQS | IL10 |
| | | ENSCTHFPGNLPNMLRDLRDAFSRVKTFF | grafted |
| | | QMKDQLDNLLLKESLLEDFKGYLGCQALS | into CDRL2. |
| | | EMIQFYLEEVMPQAENQDPDIKAHVNSLG | |
| | | ENLKTLRLRLRRCHRFLPCENGGGSGGKS | |
| | | KAVEQVKNAFNKLQEKGIYKAMSEFDIFI | |
| | | NYIEAYMTMKIRNSKLASGVPSRFSGSGS | |
| | | GTAFTLTISSLQPDDFATYYCFQGSGYPF | |
| | | TFGGGTKLEIK | |
| 3847 | Heavy chain | QVTLRESGPALVKPTQTLTLTCTFSGFSL | GFTX3b |
| | of IgGIL10M8 | STSGMSVGWIRQPPGKALEWLADIWWDDK | |
| | | KDYNPSLKSRLTISKDTSANQVVLKVTNM | |
| | | DPADTATYYCARSMITNWYFDVWGAGTTV | |
| | | TVSSASTKGPSVFPLAPSSKSTSGGTAAL | |
| | | GCLVKDYFPEPVTVSWNSGALTSGVHTFP | |
| | | AVLQSSGLYSLSSVVTVPSSSLGTQTYIC | |
| | | NVNHKPSNTKVDKRVEPKSCDKTHTCPPC | |
| | | PAPELLGGPSVFLFPPKPKDTLMISRTPE | |
| | | VTCVVVDVSHEDPEVKFNWYVDGVEVHNA | |
| | | KTKPREEQYNSTYRVVSVLTVLHQDWLNG | |
| | | KEYKCKVSNKALPAPIEKTISKAKGQPRE | |
| | | PQVYTLPPSREEMTKNQVSLTCLVKGFYP | |
| | | SDIAVEWESNGQPENNYKTTPPVLDSDGS | |
| | | FFLYSKLTVDKSRWQQGNVFSCSVMHEAL | |
| | | HNHYTQKSLSLSPGK | |
| 3848 | Light chain | DIQMTQSPSTLSASVGDRVTITCKAQLSV | GFTX3b |
| | of IgGIL10M8 | GYMHWYQQKPGKAPKLLIYDTSPGQGTQS | IL10 |
| | | ENSCTHFPGNLPNMLRDLRDAFSRVKTFF | grafted |
| | | QMKDQLDNLLLKESLLEDFKGYLGCQALS | into CDRL2. |
| | | EMIQFYLEEVMPQAENQDPDIKAHVNSLG | |
| | | ENLKTLRLRLRRCHRFLPCENGGGSGGKS | |
| | | KAVEQVKNAFNKLQEKGIYKAMSEFDIFI | |
| | | NYIEAYMTMKIRNSKLASGVPSRFSGSGS | |
| | | GTAFTLTISSLQPDDFATYYCFQGSGYPF | |
| | | TFGGGTKLEIKRTVAAPSVFIFPPSDEQL | |
| | | KSGTASVVCLLNNFYPREAKVQWKVDNAL | |
| | | QSGNSQESVTEQDSKDSTYSLSSTLTLSK | |
| | | ADYEKHKVYACEVTHQGLSSPVTKSFNRG | |
| | | EC | |
| 3849 | CDRH1 of | GFSLSTSGM | GFTX3b |
| | IgGIL10M9 | | |
| | (Chothia) | | |
| 3850 | CDRH2 of | WWDDK | GFTX3b |
| | IgGIL10M9 | | |
| | (Chothia) | | |
| 3851 | CDRH3 of | SMITNWYFDV | GFTX3b |
| | IgGIL10M9 | | |
| | (Chothia) | | |
| 3852 | CDRL1 of | QLSVGY | GFTX3b |
| | IgGIL10M9 | | |
| | (Chothia) | | |
| 3853 | CDRL2 of | DTS | GFTX3b |
| | IgGIL10M9 | | |
| | (Chothia) | | |
| 3854 | CDRL3 of | GSGSPGQGTQSENSCTHFPGNLPNMLRDL | GFTX3b |
| | IgGIL10M9 | RDAFSRVKTFFQMKDQLDNLLLKESLLED | IL10 |
| | (Chothia) | FKGYLGCQALSEMIQFYLEEVMPQAENQD | grafted |
| | | PDIKAHVNSLGENLKTLRLRLRRCHRFLP | into CDRL3. |
| | | CENGGGSGGKSKAVEQVKNAFNKLQEKGI | IL10 is |
| | | YKAMSEFDIFINYIEAYMTMKIRNYPF | bolded, |
| | | | underlined |
| 3855 | CDRH1 of | TSGMSVG | GFTX3b |
| | IgGIL10M9 | | |
| | (Kabat) | | |
| 3856 | CDRH2 of | DIWWDDKKDYNPSLKS | GFTX3b |
| | IgGIL10M9 | | |
| | (Kabat) | | |
| 3857 | CDRH3 of | SMITNWYFDV | GFTX3 |
| | IgGIL10M9 | | |
| | (Kabat) | | |
| 3858 | CDRL1 of | KAQLSVGYMH | GFTX3b |
| | IgGIL10M9 | | |
| | (Kabat) | | |
| 3859 | CDRL2 of | DTSKLAS | GFTX3b |
| | IgGIL10M9 | | |
| | (Kabat) | | |
| 3860 | CDRL3 of | FQGSGSPGQGTQSENSCTHFPGNLPNMLR | GFTX3b |
| | IgGIL10M9 | DLRDAFSRVKTFFQMKDQLDNLLLKESLL | IL10 |
| | (Kabat) | EDFKGYLGCQALSEMIQFYLEEVMPQAEN | grafted |
| | | QDPDIKAHVNSLGENLKTLRLRLRRCHRF | into CDRL3. |
| | | LPCENGGGSGGKSKAVEQVKNAFNKLQEK | IL10 is |
| | | GIYKAMSEFDIFINYIEAYMTMKIRNYPF | bolded, |
| | | T | underlined |
| 3861 | VH of | QVTLRESGPALVKPTQTLTLTCTFSGFSL | GFTX3b |
| | IgGIL10M9 | STSGMSVGWIRQPPGKALEWLADIWWDDK | |
| | | KDYNPSLKSRLTISKDTSANQVVLKVTNM | |
| | | DPADTATYYCARSMITNWYFDVWGAGTTV | |
| | | TVSS | |
| 3862 | VL of | DIQMTQSPSTLSASVGDRVTITCKAQLSV | GFTX3b |
| | IgGIL10M9 | GYMHWYQQKPGKAPKLLIYDTSKLASGVP | IL10 |
| | | SRFSGSGSGTAFTLTISSLQPDDFATYYC | grafted |
| | | FQGSGSPGQGTQSENSCTHFPGNLPNMLR | into CDRL3. |
| | | DLRDAFSRVKTFFQMKDQLDNLLLKESLL | |
| | | EDFKGYLGCQALSEMIQFYLEEVMPQAEN | |
| | | QDPDIKAHVNSLGENLKTLRLRLRRCHRF | |
| | | LPCENGGGSGGKSKAVEQVKNAFNKLQEK | |
| | | GIYKAMSEFDIFINYIEAYMTMKIRNYPF | |
| | | TFGGGTKLEIK | |
| 3863 | Heavy chain | QVTLRESGPALVKPTQTLTLTCTFSGFSL | GFTX3b |
| | of IgGIL10M9 | STSGMSVGWIRQPPGKALEWLADIWWDDK | |
| | | KDYNPSLKSRLTISKDTSANQVVLKVTNM | |
| | | DPADTATYYCARSMITNWYFDVWGAGTTV | |
| | | TVSSASTKGPSVFPLAPSSKSTSGGTAAL | |
| | | GCLVKDYFPEPVTVSWNSGALTSGVHTFP | |
| | | AVLQSSGLYSLSSVVTVPSSSLGTQTYIC | |
| | | NVNHKPSNTKVDKRVEPKSCDKTHTCPPC | |
| | | PAPELLGGPSVFLFPPKPKDTLMISRTPE | |
| | | VTCVVVDVSHEDPEVKFNWYVDGVEVHNA | |
| | | KTKPREEQYNSTYRVVSVLTVLHQDWLNG | |
| | | KEYKCKVSNKALPAPIEKTISKAKGQPRE | |
| | | PQVYTLPPSREEMTKNQVSLTCLVKGFYP | |
| | | SDIAVEWESNGQPENNYKTTPPVLDSDGS | |
| | | FFLYSKLTVDKSRWQQGNVFSCSVMHEAL | |
| | | HNHYTQKSLSLSPGK | |
| 3864 | Light chain | DIQMTQSPSTLSASVGDRVTITCKAQLSV | GFTX3b |
| | of IgGIL10M9 | GYMHWYQQKPGKAPKLLIYDTSKLASGVP | IL10 |
| | | SRFSGSGSGTAFTLTISSLQPDDFATYYC | grafted |
| | | FQGSGSPGQGTQSENSCTHFPGNLPNMLR | into CDRL3. |
| | | DLRDAFSRVKTFFQMKDQLDNLLLKESLL | |
| | | EDFKGYLGCQALSEMIQFYLEEVMPQAEN | |
| | | QDPDIKAHVNSLGENLKTLRLRLRRCHRF | |
| | | LPCENGGGSGGKSKAVEQVKNAFNKLQEK | |
| | | GIYKAMSEFDIFINYIEAYMTMKIRNYPF | |
| | | TFGGGTKLEIKRTVAAPSVFIFPPSDEQL | |
| | | KSGTASVVCLLNNFYPREAKVQWKVDNAL | |
| | | QSGNSQESVTEQDSKDSTYSLSSTLTLSK | |
| | | ADYEKHKVYACEVTHQGLSSPVTKSFNRG | |
| | | EC | |
| 3865 | CDRH1 of | GFSLSPGQGTQSENSCTHFPGNLPNMLRD | GFTX3b |
| | IgGIL10M10 | LRDAFSRVKTFFQMKDQLDNLLLKESLLE | IL10 |
| | (Chothia) | DFKGYLGCQALSEMIQFYLEEVMPQAENQ | grafted |
| | | DPDIKAHVNSLGENLKTLRLRLRRCHRFL | into CDRH1. |
| | | PCENGGGSGGKSKAVEQVKNAFNKLQEKG | IL10 is |
| | | IYKAMSEFDIFINYIEAYMTMKIRNSTSG | bolded, |
| | | M | underlined |
| 3866 | CDRH2 of | WWDDK | GFTX3b |
| | IgGIL10M10 | | |
| | (Chothia) | | |
| 3867 | CDRH3 of | SMITNWYFDV | GFTX3b |
| | IgGIL10M10 | | |
| | (Chothia) | | |
| 3868 | CDRL1 of | QLSVGY | GFTX3b |
| | IgGIL10M10 | | |
| | (Chothia) | | |
| 3869 | CDRL2 of | DTS | GFTX3b |
| | IgGIL10M10 | | |
| | (Chothia) | | |
| 3870 | CDRL3 of | GSGYPF | GFTX3b |
| | IgGIL10M10 | | |
| | (Chothia) | | |
| 3871 | CDRH1 of | SPGQGTQSENSCTHFPGNLPNMLRDLRDA | GFTX3b |
| | IgGIL10M10 | FSRVKTFFQMKDQLDNLLLKESLLEDFKG | IL10 |
| | (Kabat) | YLGCQALSEMIQFYLEEVMPQAENQDPDI | grafted |
| | | KAHVNSLGENLKTLRLRLRRCHRFLPCEN | into CDRH1. |
| | | GGGSGGKSKAVEQVKNAFNKLQEKGIYKA | IL10 is |
| | | MSEFDIFINYIEAYMTMKIRNSTSGMSVG | bolded, |
| | | | underlined |
| 3872 | CDRH2 of | DIWWDDKKDYNPSLKS | GFTX3b |
| | IgGIL10M10 | | |
| | (Kabat) | | |
| 3873 | CDRH3 of | SMITNWYFDV | GFTX3b |
| | IgGIL10M10 | | |
| | (Kabat) | | |
| 3874 | CDRL1 of | KAQLSVGYMH | GFTX3b |
| | IgGIL10M10 | | |
| | (Kabat) | | |
| 3875 | CDRL2 of | DTSKLAS | GFTX3b |
| | IgGIL10M10 | | |
| | (Kabat) | | |
| 3876 | CDRL3 of | FQGSGYPFT | GFTX3b |
| | IgGIL10M10 | | |
| | (Kabat) | | |
| 3877 | VH of | QVTLRESGPALVKPTQTLTLTCTFSGFSL | GFTX3b |
| | IgGIL10M10 | SPGQGTQSENSCTHFPGNLPNMLRDLRDA | IL10 |
| | | FSRVKTFFQMKDQLDNLLLKESLLEDFKG | grafted |
| | | YLGCQALSEMIQFYLEEVMPQAENQDPDI | into CDRH1 |
| | | KAHVNSLGENLKTLRLRLRRCHRFLPCEN | |
| | | GGGSGGKSKAVEQVKNAFNKLQEKGIYKA | |
| | | MSEFDIFINYIEAYMTMKIRNSTSGMSVG | |
| | | WIRQPPGKALEWLADIWWDDKKDYNPSLK | |
| | | SRLTISKDTSANQVVLKVTNMDPADTATY | |
| | | YCARSMITNWYFDVWGAGTTVTVSS | |
| 3878 | VL of | DIQMTQSPSTLSASVGDRVTITCKAQLSV | GFTX3b |
| | IgGIL10M10 | GYMHWYQQKPGKAPKLLIYDTSKLASGVP | |
| | | SRFSGSGSGTAFTLTISSLQPDDFATYYC | |
| | | FQGSGYPFTFGGGTKLEIK | |
| 3879 | Heavy chain | QVTLRESGPALVKPTQTLTLTCTFSGFSL | GFTX3b |
| | of IgGIL10M10 | SPGQGTQSENSCTHFPGNLPNMLRDLRDA | IL10 |
| | | FSRVKTFFQMKDQLDNLLLKESLLEDFKG | grafted |
| | | YLGCQALSEMIQFYLEEVMPQAENQDPDI | into CDRH1 |
| | | KAHVNSLGENLKTLRLRLRRCHRFLPCEN | |
| | | GGGSGGKSKAVEQVKNAFNKLQEKGIYKA | |
| | | MSEFDIFINYIEAYMTMKIRNSTSGMSVG | |
| | | WIRQPPGKALEWLADIWWDDKKDYNPSLK | |
| | | SRLTISKDTSANQVVLKVTNMDPADTATY | |
| | | YCARSMITNWYFDVWGAGTTVTVSSASTK | |
| | | GPSVFPLAPSSKSTSGGTAALGCLVKDYF | |
| | | PEPVTVSWNSGALTSGVHTFPAVLQSSGL | |
| | | YSLSSVVTVPSSSLGTQTYICNVNHKPSN | |
| | | TKVDKRVEPKSCDKTHTCPPCPAPELLGG | |
| | | PSVFLFPPKPKDTLMISRTPEVTCVVVDV | |
| | | SHEDPEVKFNWYVDGVEVHNAKTKPREEQ | |
| | | YNSTYRVVSVLTVLHQDWLNGKEYKCKVS | |
| | | NKALPAPIEKTISKAKGQPREPQVYTLPP | |
| | | SREEMTKNQVSLTCLVKGFYPSDIAVEWE | |
| | | SNGQPENNYKTTPPVLDSDGSFFLYSKLT | |
| | | VDKSRWQQGNVFSCSVMHEALHNHYTQKS | |
| | | LSLSPGK | |
| 3880 | Light chain | DIQMTQSPSTLSASVGDRVTITCKAQLSV | GFTX3b |
| | of IgGIL10M10 | GYMHWYQQKPGKAPKLLIYDTSKLASGVP | |
| | | SRFSGSGSGTAFTLTISSLQPDDFATYYC | |
| | | FQGSGYPFTFGGGTKLEIKRTVAAPSVFI | |
| | | FPPSDEQLKSGTASVVCLLNNFYPREAKV | |
| | | QWKVDNALQSGNSQESVTEQDSKDSTYSL | |
| | | SSTLTLSKADYEKHKVYACEVTHQGLSSP | |
| | | VTKSFNRGEC | |
| 3881 | CDRH1 of | GFSLSTSGM | GFTX3b |
| | IgGIL10M11 | | |
| | (Chothia) | | |
| 3882 | CDRH2 of | WWDSPGQGTQSENSCTHFPGNLPNMLRDL | GFTX3b |
| | IgGIL10M11 | RDAFSRVKTFFQMKDQLDNLLLKESLLED | IL10 |
| | (Chothia) | FKGYLGCQALSEMIQFYLEEVMPQAENQD | grafted |
| | | PDIKAHVNSLGENLKTLRLRLRRCHRFLP | into CDRH2. |
| | | CENGGGSGGKSKAVEQVKNAFNKLQEKGI | IL10 is |
| | | YKAMSEFDIFINYIEAYMTMKIRNDK | bolded, |
| | | | underlined |
| 3883 | CDRH3 of | SMITNWYFDV | GFTX3b |
| | IgGIL10M11 | | |
| | (Chothia) | | |
| 3884 | CDRL1 of | QLSVGY | GFTX3b |
| | IgGIL10M11 | | |
| | (Chothia) | | |
| 3885 | CDRL2 of | DTS | GFTX3b |
| | IgGIL10M11 | | |
| | (Chothia) | | |
| 3886 | CDRL3 of | GSGYPF | GFTX3b |
| | IgGIL10M11 | | |
| | (Chothia) | | |
| 3887 | CDRH1 of | TSGMSVG | GFTX3b |
| | IgGIL10M11 | | |
| | (Kabat) | | |
| 3888 | CDRH2 of | DIWWDSPGQGTQSENSCTHFPGNLPNMLR | GFTX3b |
| | IgGIL10M11 | DLRDAFSRVKTFFQMKDQLDNLLLKESLL | IL10 |
| | (Kabat) | EDFKGYLGCQALSEMIQFYLEEVMPQAEN | grafted |
| | | QDPDIKAHVNSLGENLKTLRLRLRRCHRF | into CDRH2. |
| | | LPCENGGGSGGKSKAVEQVKNAFNKLQEK | IL10 is |
| | | GIYKAMSEFDIFINYIEAYMTMKIRNDKK | bolded, |
| | | DYNPSLKS | underlined |
| 3889 | CDRH3 of | SMITNWYFDV | GFTX3b |
| | IgGIL10M11 | | |
| | (Kabat) | | |
| 3890 | CDRL1 of | KAQLSVGYMH | GFTX3b |
| | IgGIL10M11 | | |
| | (Kabat) | | |
| 3891 | CDRL2 of | DTSKLAS | GFTX3b |
| | IgGIL10M11 | | |
| | (Kabat) | | |
| 3892 | CDRL3 of | FQGSGYPFT | GFTX3b |
| | IgGIL10M11 | | |
| | (Kabat) | | |
| 3893 | VH of | QVTLRESGPALVKPTQTLTLTCTFSGFSL | GFTX3b |
| | IgGIL10M11 | STSGMSVGWIRQPPGKALEWLADIWWDSP | IL10 |
| | | GQGTQSENSCTHFPGNLPNMLRDLRDAFS | grafted |
| | | RVKTFFQMKDQLDNLLLKESLLEDFKGYL | into CDRH2 |
| | | GCQALSEMIQFYLEEVMPQAENQDPDIKA | |
| | | HVNSLGENLKTLRLRLRRCHRFLPCENGG | |
| | | GSGGKSKAVEQVKNAFNKLQEKGIYKAMS | |
| | | EFDIFINYIEAYMTMKIRNDKKDYNPSLK | |
| | | SRLTISKDTSANQVVLKVTNMDPADTATY | |
| | | YCARSMITNWYFDVWGAGTTVTVSS | |
| 3894 | VL of | DIQMTQSPSTLSASVGDRVTITCKAQLSV | GFTX3b |
| | IgGIL10M11 | GYMHWYQQKPGKAPKLLIYDTSKLASGVP | |
| | | SRFSGSGSGTAFTLTISSLQPDDFATYYC | |
| | | FQGSGYPFTFGGGTKLEIK | |
| 3895 | Heavy chain | QVTLRESGPALVKPTQTLTLTCTFSGFSL | GFTX3b |
| | of IgGIL10M11 | STSGMSVGWIRQPPGKALEWLADIWWDSP | IL10 |
| | | GQGTQSENSCTHFPGNLPNMLRDLRDAFS | grafted |
| | | RVKTFFQMKDQLDNLLLKESLLEDFKGYL | into CDRH2 |
| | | GCQALSEMIQFYLEEVMPQAENQDPDIKA | |
| | | HVNSLGENLKTLRLRLRRCHRFLPCENGG | |
| | | GSGGKSKAVEQVKNAFNKLQEKGIYKAMS | |
| | | EFDIFINYIEAYMTMKIRNDKKDYNPSLK | |
| | | SRLTISKDTSANQVVLKVTNMDPADTATY | |
| | | YCARSMITNWYFDVWGAGTTVTVSSASTK | |
| | | GPSVFPLAPSSKSTSGGTAALGCLVKDYF | |
| | | PEPVTVSWNSGALTSGVHTFPAVLQSSGL | |
| | | YSLSSVVTVPSSSLGTQTYICNVNHKPSN | |
| | | TKVDKRVEPKSCDKTHTCPPCPAPELLGG | |
| | | PSVFLFPPKPKDTLMISRTPEVTCVVVDV | |
| | | SHEDPEVKFNWYVDGVEVHNAKTKPREEQ | |
| | | YNSTYRVVSVLTVLHQDWLNGKEYKCKVS | |
| | | NKALPAPIEKTISKAKGQPREPQVYTLPP | |
| | | SREEMTKNQVSLTCLVKGFYPSDIAVEWE | |
| | | SNGQPENNYKTTPPVLDSDGSFFLYSKLT | |
| | | VDKSRWQQGNVFSCSVMHEALHNHYTQKS | |
| | | LSLSPGK | |
| 3896 | Light chain | DIQMTQSPSTLSASVGDRVTITCKAQLSV | GFTX3b |
| | of IgGIL10M11 | GYMHWYQQKPGKAPKLLIYDTSKLASGVP | |
| | | SRFSGSGSGTAFTLTISSLQPDDFATYYC | |
| | | FQGSGYPFTFGGGTKLEIKRTVAAPSVFI | |
| | | FPPSDEQLKSGTASVVCLLNNFYPREAKV | |
| | | QWKVDNALQSGNSQESVTEQDSKDSTYSL | |
| | | SSTLTLSKADYEKHKVYACEVTHQGLSSP | |
| | | VTKSFNRGEC | |
| 3897 | CDRH1 of | GFSLSTSGM | GFTX3b |
| | IgGIL10M12 | | |
| | (Chothia) | | |
| 3898 | CDRH2 of | WWDDK | GFTX3b |
| | IgGIL10M12 | | |
| | (Chothia) | | |
| 3899 | CDRH3 of | SMITSPGQGTQSENSCTHFPGNLPNMLRD | GFTX3b |
| | IgGIL10M12 | LRDAFSRVKTFFQMKDQLDNLLLKESLLE | IL10 |
| | (Chothia) | DFKGYLGCQALSEMIQFYLEEVMPQAENQ | grafted |
| | | DPDIKAHVNSLGENLKTLRLRLRRCHRFL | into CDRH3. |
| | | PCENGGGSGGKSKAVEQVKNAFNKLQEKG | IL10 is |
| | | IYKAMSEFDIFINYIEAYMTMKIRNNWYF | bolded, |
| | | DV | underlined |
| 3900 | CDRL1 of | QLSVGY | GFTX3b |
| | IgGIL10M12 | | |
| | (Chothia) | | |
| 3901 | CDRL2 of | DTS | GFTX3b |
| | IgGIL10M12 | | |
| | (Chothia) | | |
| 3902 | CDRL3 of | GSGYPF | GFTX3b |
| | IgGIL10M12 | | |
| | (Chothia) | | |
| 3903 | CDRH1 of | TSGMSVG | GFTX3b |
| | IgGIL10M12 | | |
| | (Kabat) | | |
| 3904 | CDRH2 of | DIWWDDKKDYNPSLKS | GFTX3b |
| | IgGIL10M12 | | |
| | (Kabat) | | |
| 3905 | CDRH3 of | SMITSPGQGTQSENSCTHFPGNLPNMLRD | GFTX3b |
| | IgGIL10M12 | LRDAFSRVKTFFQMKDQLDNLLLKESLLE | IL10 |
| | (Kabat) | DFKGYLGCQALSEMIQFYLEEVMPQAENQ | grafted |
| | | DPDIKAHVNSLGENLKTLRLRLRRCHRFL | into CDRH3. |
| | | PCENGGGSGGKSKAVEQVKNAFNKLQEKG | IL10 is |
| | | IYKAMSEFDIFINYIEAYMTMKIRNNWYF | bolded, |
| | | DV | underlined |
| 3906 | CDRL1 of | KAQLSVGYMH | GFTX3b |
| | IgGIL10M12 | | |
| | (Kabat) | | |
| 3907 | CDRL2 of | DTSKLAS | GFTX3b |
| | IgGIL10M12 | | |
| | (Kabat) | | |
| 3908 | CDRL3 of | FQGSGYPFT | GFTX3b |
| | IgGIL10M12 | | |
| | (Kabat) | | |
| 3909 | VH of | QVTLRESGPALVKPTQTLTLTCTFSGFSL | GFTX3b |
| | IgGIL10M12 | STSGMSVGWIRQPPGKALEWLADIWWDDK | IL10 |
| | | KDYNPSLKSRLTISKDTSANQVVLKVTNM | grafted |
| | | DPADTATYYCARSMITSPGQGTQSENSCT | into CDRH3 |
| | | HFPGNLPNMLRDLRDAFSRVKTFFQMKOQ | |
| | | LDNLLLKESLLEDFKGYLGCQALSEMIQF | |
| | | YLEEVMPQAENQDPDIKAHVNSLGENLKT | |
| | | LRLRLRRCHRFLPCENGGGSGGKSKAVEQ | |
| | | VKNAFNKLQEKGIYKAMSEFDIFINYIEA | |
| | | YMTMKIRNNWYFDVWGAGTTVTVSS | |
| 3910 | VL of | DIQMTQSPSTLSASVGDRVTITCKAQLSV | GFTX3b |
| | IgGIL10M12 | GYMHWYQQKPGKAPKLLIYDTSKLASGVP | |
| | | SRFSGSGSGTAFTLTISSLQPDDFATYYC | |
| | | FQGSGYPFTFGGGTKLEIK | |
| 3911 | Heavy chain | QVTLRESGPALVKPTQTLTLTCTFSGFSL | GFTX3b |
| | of IgGIL10M12 | STSGMSVGWIRQPPGKALEWLADIWWDDK | IL10 |
| | | KDYNPSLKSRLTISKDTSANQVVLKVTNM | grafted |
| | | DPADTATYYCARSMITSPGQGTQSENSCT | into CDRH3 |
| | | HFPGNLPNMLRDLRDAFSRVKTFFQMKOQ | |
| | | LDNLLLKESLLEDFKGYLGCQALSEMIQF | |
| | | YLEEVMPQAENQDPDIKAHVNSLGENLKT | |
| | | LRLRLRRCHRFLPCENGGGSGGKSKAVEQ | |
| | | VKNAFNKLQEKGIYKAMSEFDIFINYIEA | |
| | | YMTMKIRNNWYFDVWGAGTTVTVSSASTK | |
| | | GPSVFPLAPSSKSTSGGTAALGCLVKDYF | |
| | | PEPVTVSWNSGALTSGVHTFPAVLQSSGL | |
| | | YSLSSVVTVPSSSLGTQTYICNVNHKPSN | |
| | | TKVDKRVEPKSCDKTHTCPPCPAPELLGG | |
| | | PSVFLFPPKPKDTLMISRTPEVTCVVVDV | |
| | | SHEDPEVKFNWYVDGVEVHNAKTKPREEQ | |
| | | YNSTYRVVSVLTVLHQDWLNGKEYKCKVS | |
| | | NKALPAPIEKTISKAKGQPREPQVYTLPP | |
| | | SREEMTKNQVSLTCLVKGFYPSDIAVEWE | |
| | | SNGQPENNYKTTPPVLDSDGSFFLYSKLT | |
| | | VDKSRWQQGNVFSCSVMHEALHNHYTQKS | |
| | | LSLSPGK | |
| 3912 | Light chain | DIQMTQSPSTLSASVGDRVTITCKAQLSV | GFTX3b |
| | of IgGIL10M12 | GYMHWYQQKPGKAPKLLIYDTSKLASGVP | |
| | | SRFSGSGSGTAFTLTISSLQPDDFATYYC | |
| | | FQGSGYPFTFGGGTKLEIKRTVAAPSVFI | |
| | | FPPSDEQLKSGTASVVCLLNNFYPREAKV | |
| | | QWKVDNALQSGNSQESVTEQDSKDSTYSL | |
| | | SSTLTLSKADYEKHKVYACEVTHQGLSSP | |
| | | VTKSFNRGEC | |
| 3913 | CDRH1 of | GFSLSTSGM | GFTX3b |
| | IgGIL10M13 | | |
| | (Chothia) | | |
| 3914 | CDRH2 of | WWDDK | GFTX3b |
| | IgGIL10M13 | | |
| | (Chothia) | | |
| 3915 | CDRH3 of | SMITNWYFDV | GFTX3b |
| | IgGIL10M13 | | |
| | (Chothia) | | |
| 3916 | CDRL1 of | QLSSPGQGTQSENSCTHFPGNLPNMLRDL | IL10 |
| | IgGIL10M13 | RDAFSRVKTFFQMKDQLDNLLLKESLLED | grafted |
| | (Chothia) | FKGYLGCQALSEMIQFYLEEVMPQAENQD | into CDRL1. |
| | | PDIKAHVNSLGENLKTLRLRLRRCHRFLP | IL10 is |
| | | CENGGGSGGKSKAVEQVKNAFNKLQEKGI | bolded, |
| | | YKAMSEFDIFINYIEAYMTMKIRNVGY | underlined |
| 3917 | CDRL2 of | DTS | GFTX3b |
| | IgGIL10M13 | | |
| | (Chothia) | | |
| 3918 | CDRL3 of | GSGYPF | GFTX3b |
| | IgGIL10M13 | | |
| | (Chothia) | | |
| 3919 | CDRH1 of | TSGMSVG | GFTX3b |
| | IgGIL10M13 | | |
| | (Kabat) | | |
| 3920 | CDRH2 of | DIWWDDKKDYNPSLKS | GFTX3b |
| | IgGIL10M13 | | |
| | (Kabat) | | |
| 3921 | CDRH3 of | SMITNWYFDV | GFTX3b |
| | IgGIL10M13 | | |
| | (Kabat) | | |
| 3922 | CDRL1 of | KAQLSSPGQGTQSENSCTHFPGNLPNMLR | IL10 |
| | IgGIL10M13 | DLRDAFSRVKTFFQMKDQLDNLLLKESLL | grafted |
| | (Kabat) | EDFKGYLGCQALSEMIQFYLEEVMPQAEN | into CDRL1 |
| | | QDPDIKAHVNSLGENLKTLRLRLRRCHRF | IL10 is |
| | | LPCENGGGSGGKSKAVEQVKNAFNKLQEK | bolded, |
| | | GIYKAMSEFDIFINYIEAYMTMKIRNVGY | underlined |
| | | MH | GFTX3b |
| 3923 | CDRL2 of | DTSKLAS | GFTX3b |
| | IgGIL10M13 | | |
| | (Kabat) | | |
| 3924 | CDRL3 of | FQGSGYPFT | GFTX3b |
| | IgGIL10M13 | | |
| | (Kabat) | | |
| 3925 | VH of | QVTLRESGPALVKPTQTLTLTCTFSGFSL | GFTX3b |
| | IgGIL10M13 | STSGMSVGWIRQPPGKALEWLADIWWDDK | |
| | | KDYNPSLKSRLTISKDTSANQVVLKVTNM | |
| | | DPADTATYYCARSMITNWYFDVWGAGTTV | |
| | | TVSS | |
| 3926 | VL of | DIQMTQSPSTLSASVGDRVTITCKAQLSS | IL10 |
| | IgGIL10M13 | PGQGTQSENSCTHFPGNLPNMLRDLRDAF | grafted |
| | | SRVKTFFQMKDQLDNLLLKESLLEDFKGY | into CDRL1 |
| | | LGCQALSEMIQFYLEEVMPQAENQDPDIK | GFTX3b |
| | | AHVNSLGENLKTLRLRLRRCHRFLPCENG | |
| | | GGSGGKSKAVEQVKNAFNKLQEKGIYKAM | |
| | | SEFDIFINYIEAYMTMKIRNVGYMHWYQQ | |
| | | KPGKAPKLLIYDTSKLASGVPSRFSGSGS | |
| | | GTAFTLTISSLQPDDFATYYCFQGSGYPF | |
| | | TFGGGTKLEIK | |
| 3927 | Heavy chain | QVTLRESGPALVKPTQTLTLTCTFSGFSL | GFTX3b |
| | of IgGIL10M13 | STSGMSVGWIRQPPGKALEWLADIWWDDK | |
| | | KDYNPSLKSRLTISKDTSANQVVLKVTNM | |
| | | DPADTATYYCARSMITNWYFDVWGAGTTV | |
| | | TVSSASTKGPSVFPLAPSSKSTSGGTAAL | |
| | | GCLVKDYFPEPVTVSWNSGALTSGVHTFP | |
| | | AVLQSSGLYSLSSVVTVPSSSLGTQTYIC | |
| | | NVNHKPSNTKVDKRVEPKSCDKTHTCPPC | |
| | | PAPELLGGPSVFLFPPKPKDTLMISRTPE | |
| | | VTCVVVAVSHEDPEVKFNWYVDGVEVHNA | |
| | | KTKPREEQYNSTYRVVSVLTVLHQDWLNG | |
| | | KEYKCKVSNKALAAPIEKTISKAKGQPRE | |
| | | PQVYTLPPSREEMTKNQVSLTCLVKGFYP | |
| | | SDIAVEWESNGQPENNYKTTPPVLDSDGS | |
| | | FFLYSKLTVDKSRWQQGNVFSCSVMHEAL | |
| | | HNHYTQKSLSLSPGK | |
| 3928 | Light chain | DIQMTQSPSTLSASVGDRVTITCKAQLSS | IL10 |
| | of IgGIL10M13 | PGQGTQSENSCTHFPGNLPNMLRDLRDAF | grafted |
| | | SRVKTFFQMKDQLDNLLLKESLLEDFKGY | into CDRL1 |
| | | LGCQALSEMIQFYLEEVMPQAENQDPDIK | GFTX3b |
| | | AHVNSLGENLKTLRLRLRRCHRFLPCENG | |
| | | GGSGGKSKAVEQVKNAFNKLQEKGIYKAM | |
| | | SEFDIFINYIEAYMTMKIRNVGYMHWYQQ | |
| | | KPGKAPKLLIYDTSKLASGVPSRFSGSGS | |
| | | GTAFTLTISSLQPDDFATYYCFQGSGYPF | |
| | | TFGGGTKLEIKRTVAAPSVFIFPPSDEQL | |
| | | KSGTASVVCLLNNFYPREAKVQWKVDNAL | |
| | | QSGNSQESVTEQDSKDSTYSLSSTLTLSK | |
| | | ADYEKHKVYACEVTHQGLSSPVTKSFNRG | |
| | | EC | |
| 3929 | Monomeric | SPGQGTQSENSCTHFPGNLPNMLRDLRDA | Mature |
| | IL10 (IL10M) | FSRVKTFFQMKDQLDNLLLKESLLEDFKG | form of |
| | | YLGCQALSEMIQFYLEEVMPQAENQDPDI | IL10, |
| | | KAHVNSLGENLKTLRLRLRRCHRFLPCEN | with an |
| | | GGGSGGKSKAVEQVKNAFNKLQEKGIYKA | internal |
| | | MSEFDIFINYIEAYMTMKIRN | G35G2 |
| | | | spacer |
| | | | (SEQ ID |
| | | | NO: 3971) |
| 3930 | CDRH1 of | GFSLSTSGM | GFTX3b |
| | IgGIL10M14 | | |
| | (Chothia) | | |
| 3931 | CDRH2 of | WWDDK | GFTX3b |
| | IgGIL10M14 | | |
| | (Chothia) | | |
| 3932 | CDRH3 of | SMITNWYFDV | GFTX3b |
| | IgGIL10M14 | | |
| | (Chothia) | | |
| 3933 | CDRL1 of | QLSSPGQGTQSENSCTHFPGNLPNMLRDL | IL10 |
| | IgGIL10M14 | RDAFSRVKTFFQMKDQLDNLLLKESLLED | grafted |
| | (Chothia) | FKGYLGCQALSEMIQFYLEEVMPQAENQD | into CDRL1. |
| | | PDIKAHVNSLGENLKTLRLRLRRCHRFLP | IL10 is |
| | | CENGGGSGGKSKAVEQVKNAFNKLQEKGI | bolded, |
| | | YKAMSEFDIFINYIEAYMTMKIRNVGY | underlined |
| | | | GFTX3b |
| 3934 | CDRL2 of | DTS | GFTX3b |
| | IgGIL10M14 | | |
| | (Chothia) | | |
| 3935 | CDRL3 of | GSGYPF | GFTX3b |
| | IgGIL10M14 | | |
| | (Chothia) | | |
| 3936 | CDRH1 of | TSGMSVG | GFTX3b |
| | IgGIL10M14 | | |
| | (Kabat) | | |
| 3937 | CDRH2 of | DIWWDDKKDYNPSLKS | GFTX3b |
| | IgGIL10M14 | | |
| | (Kabat) | | |
| 3938 | CDRH3 of | SMITNWYFDV | GFTX3b |
| | IgGIL10M14 | | |
| | (Kabat) | | |
| 3939 | CDRL1 of | KAQLSSPGQGTQSENSCTHFPGNLPNMLR | IL10 |
| | IgGIL10M14 | DLRDAFSRVKTFFQMKDQLDNLLLKESLL | grafted |
| | (Kabat) | EDFKGYLGCQALSEMIQFYLEEVMPQAEN | into CDRL1. |
| | | QDPDIKAHVNSLGENLKTLRLRLRRCHRF | IL10 is |
| | | LPCENGGGSGGKSKAVEQVKNAFNKLQEK | bolded, |
| | | GIYKAMSEFDIFINYIEAYMTMKIRNVGY | underlined |
| | | MH | GFTX3b |
| 3940 | CDRL2 of | DTSKLAS | GFTX3b |
| | IgGIL10M14 | | |
| | (Kabat) | | |
| 3941 | CDRL3 of | FQGSGYPFT | GFTX3b |
| | IgGIL10M14 | | |
| | (Kabat) | | |
| 3942 | VH of | QVTLRESGPALVKPTQTLTLTCTFSGFSL | GFTX3b |
| | IgGIL10M14 | STSGMSVGWIRQPPGKALEWLADIWWDDK | |
| | | KDYNPSLKSRLTISKDTSANQVVLKVTNM | |
| | | DPADTATYYCARSMITNWYFDVWGAGTTV | |
| | | TVSS | |
| 3943 | VL of | DIQMTQSPSTLSASVGDRVTITCKAQLSS | IL10 |
| | IgGIL10M14 | PGQGTQSENSCTHFPGNLPNMLRDLRDAF | grafted |
| | | SRVKTFFQMKDQLDNLLLKESLLEDFKGY | into CDRL1 |
| | | LGCQALSEMIQFYLEEVMPQAENQDPDIK | GFTX3b |
| | | AHVNSLGENLKTLRLRLRRCHRFLPCENG | |
| | | GGSGGKSKAVEQVKNAFNKLQEKGIYKAM | |
| | | SEFDIFINYIEAYMTMKIRNVGYMHWYQQ | |
| | | KPGKAPKLLIYDTSKLASGVPSRFSGSGS | |
| | | GTAFTLTISSLQPDDFATYYCFQGSGYPF | |
| | | TFGGGTKLEIK | |
| 3944 | Heavy chain | QVTLRESGPALVKPTQTLTLTCTFSGFSL | GFTX3b |
| | of IgGIL10M14 | STSGMSVGWIRQPPGKALEWLADIWWDDK | LALA |
| | | KDYNPSLKSRLTISKDTSANQVVLKVTNM | |
| | | DPADTATYYCARSMITNWYFDVWGAGTTV | |
| | | TVSSASTKGPSVFPLAPSSKSTSGGTAAL | |
| | | GCLVKDYFPEPVTVSWNSGALTSGVHTFP | |
| | | AVLQSSGLYSLSSVVTVPSSSLGTQTYIC | |
| | | NVNHKPSNTKVDKRVEPKSCDKTHTCPPC | |
| | | PAPEAAGGPSVFLFPPKPKDTLMISRTPE | |
| | | VTCVVVDVSHEDPEVKFNWYVDGVEVHNA | |
| | | KTKPREEQYNSTYRVVSVLTVLHQDWLNG | |
| | | KEYKCKVSNKALPAPIEKTISKAKGQPRE | |
| | | PQVYTLPPSREEMTKNQVSLTCLVKGFYP | |
| | | SDIAVEWESNGQPENNYKTTPPVLDSDGS | |
| | | FFLYSKLTVDKSRWQQGNVFSCSVMHEAL | |
| | | HNHYTQKSLSLSPGK | |
| 3945 | Light chain | DIQMTQSPSTLSASVGDRVTITCKAQLSS | GFTX3b |
| | of IgGIL10M14 | PGQGTQSENSCTHFPGNLPNMLRDLRDAF | LALA |
| | | SRVKTFFQMKDQLDNLLLKESLLEDFKGY | IL10 |
| | | LGCQALSEMIQFYLEEVMPQAENQDPDIK | grafted |
| | | AHVNSLGENLKTLRLRLRRCHRFLPCENG | into CDRL1. |
| | | GGSGGKSKAVEQVKNAFNKLQEKGIYKAM | |
| | | SEFDIFINYIEAYMTMKIRNVGYMHWYQQ | |
| | | KPGKAPKLLIYDTSKLASGVPSRFSGSGS | |
| | | GTAFTLTISSLQPDDFATYYCFQGSGYPF | |
| | | TFGGGTKLEIKRTVAAPSVFIFPPSDEQL | |
| | | KSGTASVVCLLNNFYPREAKVQWKVDNAL | |
| | | QSGNSQESVTEQDSKDSTYSLSSTLTLSK | |
| | | ADYEKHKVYACEVTHQGLSSPVTKSFNRG | |
| | | EC | |
| 3946 | CDRH1 of | GFSLSTSGM | GFTX3b |
| | IgGIL10M15 | | |
| | (Chothia) | | |
| 3947 | CDRH2 of | WWDDK | GFTX3b |
| | IgGIL10M15 | | |
| | (Chothia) | | |
| 3948 | CDRH3 of | SMITNWYFDV | GFTX3b |
| | IgGIL10M15 | | |
| | (Chothia) | | |
| 3949 | CDRL1 of | QLSSPGQGTQSENSCTHFPGNLPNMLRDL | IL10 |
| | IgGIL10M15 | RDAFSRVKTFFQMKDQLDNLLLKESLLED | grafted |
| | (Chothia) | FKGYLGCQALSEMIQFYLEEVMPQAENQD | into CDRL1. |
| | | PDIKAHVNSLGENLKTLRLRLRRCHRFLP | IL10 is |
| | | CENGGGSGGKSKAVEQVKNAFNKLQEKGI | bolded, |
| | | YKAMSEFDIFINYIEAYMTMKIRNVGY | underlined |
| 3950 | CDRL2 of | DTS | GFTX3b |
| | IgGIL10M15 | | |
| | (Chothia) | | |
| 3951 | CDRL3 of | GSGYPF | GFTX3b |
| | IgGIL10M15 | | |
| | (Chothia) | | |
| 3952 | CDRH1 of | TSGMSVG | GFTX3b |
| | IgGIL10M15 | | |
| | (Kabat) | | |
| 3953 | CDRH2 of | DIWWDDKKDYNPSLKS | GFTX3b |
| | IgGIL10M15 | | |
| | (Kabat) | | |
| 3954 | CDRH3 of | SMITNWYFDV | GFTX3b |
| | IgGIL10M15 | | |
| | (Kabat) | | |
| 3955 | CDRL1 of | KAQLSSPGQGTQSENSCTHFPGNLPNMLR | IL10 |
| | IgGIL10M15 | DLRDAFSRVKTFFQMKDQLDNLLLKESLL | grafted |
| | (Kabat) | EDFKGYLGCQALSEMIQFYLEEVMPQAEN | into CDRL1 |
| | | QDPDIKAHVNSLGENLKTLRLRLRRCHRF | IL10 is |
| | | LPCENGGGSGGKSKAVEQVKNAFNKLQEK | bolded, |
| | | GIYKAMSEFDIFINYIEAYMTMKIRNVGY | underlined |
| | | MH | GFTX3b |
| 3956 | CDRL2 of | DTSKLAS | GFTX3b |
| | IgGIL10M15 | | |
| | (Kabat) | | |
| 3957 | CDRL3 of | FQGSGYPFT | GFTX3b |
| | IgGIL10M15 | | |
| | (Kabat) | | |
| 3958 | VH of | QVTLRESGPALVKPTQTLTLTCTFSGFSL | GFTX3b |
| | IgGIL10M15 | STSGMSVGWIRQPPGKALEWLADIWWDDK | |
| | | KDYNPSLKSRLTISKDTSANQVVLKVTNM | |
| | | DPADTATYYCARSMITNWYFDVWGAGTTV | |
| | | TVSS | |
| 3959 | VL of | DIQMTQSPSTLSASVGDRVTITCKAQLSS | IL10 |
| | IgGIL10M15 | PGQGTQSENSCTHFPGNLPNMLRDLRDAF | grafted |
| | | SRVKTFFQMKDQLDNLLLKESLLEDFKGY | into CDRL1 |
| | | LGCQALSEMIQFYLEEVMPQAENQDPDIK | IL10 is |
| | | AHVNSLGENLKTLRLRLRRCHRFLPCENG | bolded, |
| | | GGSGGKSKAVEQVKNAFNKLQEKGIYKAM | underlined |
| | | SEFDIFINYIEAYMTMKIRNVGYMHWYQQ | GFTX3b |
| | | KPGKAPKLLIYDTSKLASGVPSRFSGSGS | |
| | | GTAFTLTISSLQPDDFATYYCFQGSGYPF | |
| | | TFGGGTKLEIK | |
| 3960 | Heavy chain | QVTLRESGPALVKPTQTLTLTCTFSGFSL | GFTX3b |
| | of IgGIL10M15 | STSGMSVGWIRQPPGKALEWLADIWWDDK | NEM |
| | | KDYNPSLKSRLTISKDTSANQVVLKVTNM | |
| | | DPADTATYYCARSMITNWYFDVWGAGTTV | |
| | | TVSSASTKGPSVFPLAPSSKSTSGGTAAL | |
| | | GCLVKDYFPEPVTVSWNSGALTSGVHTFP | |
| | | AVLQSSGLYSLSSVVTVPSSSLGTQTYIC | |
| | | NVNHKPSNTKVDKRVEPKSCDKTHTCPPC | |
| | | PAPELLGGPSVFLFPPKPKDTLMISRTPE | |
| | | VTCVVVDVSHEDPEVKFNWYVDGVEVHNA | |
| | | KTKPREEQYASTYRVVSVLTVLHQDWLNG | |
| | | KEYKCKVSNKALPAPIEKTISKAKGQPRE | |
| | | PQVYTLPPSREEMTKNQVSLTCLVKGFYP | |
| | | SDIAVEWVSNGQPENNYKTTPPVLDSDGS | |
| | | FFLYSKLTVDKSRWQQGNVFSCSVIHEAL | |
| | | HNHYTQKSLSLSPGK | |
| 3961 | Light chain | DIQMTQSPSTLSASVGDRVTITCKAQLSS | GFTX3b |
| | of IgGIL10M15 | PGQGTQSENSCTHFPGNLPNMLRDLRDAF | NEM IL10 |
| | | SRVKTFFQMKDQLDNLLLKESLLEDFKGY | grafted |
| | | LGCQALSEMIQFYLEEVMPQAENQDPDIK | into CDRL1. |
| | | AHVNSLGENLKTLRLRLRRCHRFLPCENG | IL10 is |
| | | GGSGGKSKAVEQVKNAFNKLQEKGIYKAM | bolded, |
| | | SEFDIFINYIEAYMTMKIRNVGYMHWYQQ | underlined |
| | | KPGKAPKLLIYDTSKLASGVPSRFSGSGS | |
| | | GTAFTLTISSLQPDDFATYYCFQGSGYPF | |
| | | TFGGGTKLEIKRTVAAPSVFIFPPSDEQL | |
| | | KSGTASVVCLLNNFYPREAKVQWKVDNAL | |
| | | QSGNSQESVTEQDSKDSTYSLSSTLTLSK | |
| | | ADYEKHKVYACEVTHQGLSSPVTKSFNRG | |
| | | EC | |
| 3962 | VH of | CAGGTCACACTGAGAGAGTCAGGCCCTGC | |
| | IgGIL10M7 | CCTGGTCAAGCCTACTCAGACCCTGACCC | |
| | | TGACCTGCACCTTTAGCGGCTTTAGCCTG | |
| | | AGCACTAGCGGAATGAGCGTGGGCTGGAT | |
| | | TAGACAGCCCCCTGGTAAAGCCCTGGAGT | |
| | | GGCTGGCCGATATTTGGTGGGACGATAAG | |
| | | AAGGACTATAACCCTAGCCTGAAGTCTAG | |
| | | GCTGACTATCTCTAAGGACACTAGCGCTA | |
| | | ATCAGGTGGTGCTGAAAGTGACTAATATG | |
| | | GACCCCGCCGACACCGCTACCTACTACTG | |
| | | CGCTAGATCTATGATCACTAACTGGTACT | |
| | | TCGACGTGTGGGGCGCTGGCACTACCGTG | |
| | | ACCGTGTCTAGC | |
| 3963 | VL of | GATATTCAGATGACTCAGTCACCTAGCAC | |
| | IgGIL10M7 | CCTGAGCGCTAGTGTGGGCGATAGAGTGA | |
| | | CTATCACCTGTAAAGCTCAGCTGTCTAGC | |
| | | CCAGGTCAGGGAACTCAGTCAGAGAATAG | |
| | | CTGCACTCACTTCCCCGGTAACCTGCCTA | |
| | | ATATGCTGAGAGATCTGAGGGACGCCTTC | |
| | | TCTAGGGTCAAGACCTTCTTTCAGATGAA | |
| | | GGATCAGCTGGATAACCTGCTGCTGAAAG | |
| | | AGTCACTGCTGGAGGACTTTAAGGGCTAC | |
| | | CTGGGCTGTCAGGCCCTGAGCGAGATGAT | |
| | | TCAGTTCTACCTGGAAGAAGTGATGCCCC | |
| | | AGGCCGAGAATCAGGACCCCGATATTAAG | |
| | | GCTCACGTGAACTCACTGGGCGAGAACCT | |
| | | GAAAACCCTGAGACTGAGGCTGAGGCGGT | |
| | | GTCACCGGTTTCTGCCCTGCGAGAACGGC | |
| | | GGAGGTAGCGGCGGTAAATCTAAGGCCGT | |
| | | GGAACAGGTCAAAAACGCCTTTAACAAGC | |
| | | TGCAGGAAAAGGGAATCTATAAGGCTATG | |
| | | AGCGAGTTCGACATCTTTATTAACTATAT | |
| | | CGAGGCCTATATGACTATGAAGATTAGGA | |
| | | ACGTGGGCTATATGCACTGGTATCAGCAG | |
| | | AAGCCCGGTAAAGCCCCTAAGCTGCTGAT | |
| | | CTACGACACCTCTAAGCTGGCTAGTGGCG | |
| | | TGCCCTCTAGGTTTAGCGGTAGCGGTAGT | |
| | | GGCACCGCCTTCACCCTGACTATCTCTAG | |
| | | CCTGCAGCCCGACGACTTCGCTACCTACT | |
| | | ACTGTTTTCAGGGTAGCGGCTACCCCTTC | |
| | | ACCTTCGGCGGAGGCACTAAGCTGGAGAT | |
| | | TAAG | |
| 3964 | Heavy Chain | CAGGTCACACTGAGAGAGTCAGGCCCTGC | |
| | of IgGIL10M7 | CCTGGTCAAGCCTACTCAGACCCTGACCC | |
| | | TGACCTGCACCTTTAGCGGCTTTAGCCTG | |
| | | AGCACTAGCGGAATGAGCGTGGGCTGGAT | |
| | | TAGACAGCCCCCTGGTAAAGCCCTGGAGT | |
| | | GGCTGGCCGATATTTGGTGGGACGATAAG | |
| | | AAGGACTATAACCCTAGCCTGAAGTCTAG | |
| | | GCTGACTATCTCTAAGGACACTAGCGCTA | |
| | | ATCAGGTGGTGCTGAAAGTGACTAATATG | |
| | | GACCCCGCCGACACCGCTACCTACTACTG | |
| | | CGCTAGATCTATGATCACTAACTGGTACT | |
| | | TCGACGTGTGGGGCGCTGGCACTACCGTG | |
| | | ACCGTGTCTAGCGCTAGCACTAAGGGCCC | |
| | | AAGTGTGTTTCCCCTGGCCCCCAGCAGCA | |
| | | AGTCTACTTCCGGCGGAACTGCTGCCCTG | |
| | | GGTTGCCTGGTGAAGGACTACTTCCCCGA | |
| | | GCCCGTGACAGTGTCCTGGAACTCTGGGG | |
| | | CTCTGACTTCCGGCGTGCACACCTTCCCC | |
| | | GCCGTGCTGCAGAGCAGCGGCCTGTACAG | |
| | | CCTGAGCAGCGTGGTGACAGTGCCCTCCA | |
| | | GCTCTCTGGGAACCCAGACCTATATCTGC | |
| | | AACGTGAACCACAAGCCCAGCAACACCAA | |
| | | GGTGGACAAGAGAGTGGAGCCCAAGAGCT | |
| | | GCGACAAGACCCACACCTGCCCCCCCTGC | |
| | | CCAGCTCCAGAACTGCTGGGAGGGCCTTC | |
| | | CGTGTTCCTGTTCCCCCCCAAGCCCAAGG | |
| | | ACACCCTGATGATCAGCAGGACCCCCGAG | |
| | | GTGACCTGCGTGGTGGTGGACGTGTCCCA | |
| | | CGAGGACCCAGAGGTGAAGTTCAACTGGT | |
| | | ACGTGGACGGCGTGGAGGTGCACAACGCC | |
| | | AAGACCAAGCCCAGAGAGGAGCAGTACAA | |
| | | CAGCACCTACAGGGTGGTGTCCGTGCTGA | |
| | | CCGTGCTGCACCAGGACTGGCTGAACGGC | |
| | | AAAGAATACAAGTGCAAAGTCTCCAACAA | |
| | | GGCCCTGCCAGCCCCAATCGAAAAGACAA | |
| | | TCAGCAAGGCCAAGGGCCAGCCACGGGAG | |
| | | CCCCAGGTGTACACCCTGCCCCCCAGCCG | |
| | | GGAGGAGATGACCAAGAACCAGGTGTCCC | |
| | | TGACCTGTCTGGTGAAGGGCTTCTACCCC | |
| | | AGCGATATCGCCGTGGAGTGGGAGAGCAA | |
| | | CGGCCAGCCCGAGAACAACTACAAGACCA | |
| | | CCCCCCCAGTGCTGGACAGCGACGGCAGC | |
| | | TTCTTCCTGTACAGCAAGCTGACCGTGGA | |
| | | CAAGTCCAGGTGGCAGCAGGGCAACGTGT | |
| | | TCAGCTGCAGCGTGATGCACGAGGCCCTG | |
| | | CACAACCACTACACCCAGAAGTCCCTGAG | |
| | | CCTGAGCCCCGGCAAG | |
| 3965 | Light Chain | GATATTCAGATGACTCAGTCACCTAGCAC | |
| | of IgGIL10M7 | CCTGAGCGCTAGTGTGGGCGATAGAGTGA | |
| | | CTATCACCTGTAAAGCTCAGCTGTCTAGC | |
| | | CCAGGTCAGGGAACTCAGTCAGAGAATAG | |
| | | CTGCACTCACTTCCCCGGTAACCTGCCTA | |
| | | ATATGCTGAGAGATCTGAGGGACGCCTTC | |
| | | TCTAGGGTCAAGACCTTCTTTCAGATGAA | |
| | | GGATCAGCTGGATAACCTGCTGCTGAAAG | |
| | | AGTCACTGCTGGAGGACTTTAAGGGCTAC | |
| | | CTGGGCTGTCAGGCCCTGAGCGAGATGAT | |
| | | TCAGTTCTACCTGGAAGAAGTGATGCCCC | |
| | | AGGCCGAGAATCAGGACCCCGATATTAAG | |
| | | GCTCACGTGAACTCACTGGGCGAGAACCT | |
| | | GAAAACCCTGAGACTGAGGCTGAGGCGGT | |
| | | GTCACCGGTTTCTGCCCTGCGAGAACGGC | |
| | | GGAGGTAGCGGCGGTAAATCTAAGGCCGT | |
| | | GGAACAGGTCAAAAACGCCTTTAACAAGC | |
| | | TGCAGGAAAAGGGAATCTATAAGGCTATG | |
| | | AGCGAGTTCGACATCTTTATTAACTATAT | |
| | | CGAGGCCTATATGACTATGAAGATTAGGA | |
| | | ACGTGGGCTATATGCACTGGTATCAGCAG | |
| | | AAGCCCGGTAAAGCCCCTAAGCTGCTGAT | |
| | | CTACGACACCTCTAAGCTGGCTAGTGGCG | |
| | | TGCCCTCTAGGTTTAGCGGTAGCGGTAGT | |
| | | GGCACCGCCTTCACCCTGACTATCTCTAG | |
| | | CCTGCAGCCCGACGACTTCGCTACCTACT | |
| | | ACTGTTTTCAGGGTAGCGGCTACCCCTTC | |
| | | ACCTTCGGCGGAGGCACTAAGCTGGAGAT | |
| | | TAAGCGTACGGTGGCCGCTCCCAGCGTGT | |
| | | TCATCTTCCCCCCCAGCGACGAGCAGCTG | |
| | | AAGAGCGGCACCGCCAGCGTGGTGTGCCT | |
| | | GCTGAACAACTTCTACCCCCGGGAGGCCA | |
| | | AGGTGCAGTGGAAGGTGGACAACGCCCTG | |
| | | CAGAGCGGCAACAGCCAGGAGAGCGTCAC | |
| | | CGAGCAGGACAGCAAGGACTCCACCTACA | |
| | | GCCTGAGCAGCACCCTGACCCTGAGCAAG | |
| | | GCCGACTACGAGAAGCATAAGGTGTACGC | |
| | | CTGCGAGGTGACCCACCAGGGCCTGTCCA | |
| | | GCCCCGTGACCAAGAGCTTCAACAGGGGC | |
| | | GAGTGC | |
| 3966 | VH of | CAGGTCACACTGAGAGAGTCAGGCCCTGC | |
| | IgGIL10M13 | CCTGGTCAAGCCTACTCAGACCCTGACCC | |
| | | TGACCTGCACCTTTAGCGGCTTTAGCCTG | |
| | | AGCACTAGCGGAATGAGCGTGGGCTGGAT | |
| | | TAGACAGCCCCCTGGTAAAGCCCTGGAGT | |
| | | GGCTGGCCGATATTTGGTGGGACGATAAG | |
| | | AAGGACTATAACCCTAGCCTGAAGTCTAG | |
| | | GCTGACTATCTCTAAGGACACTAGCGCTA | |
| | | ATCAGGTGGTGCTGAAAGTGACTAATATG | |
| | | GACCCCGCCGACACCGCTACCTACTACTG | |
| | | CGCTAGATCTATGATCACTAACTGGTACT | |
| | | TCGACGTGTGGGGCGCTGGCACTACCGTG | |
| | | ACCGTGTCTAGC | |
| 3967 | VL of | GATATTCAGATGACTCAGTCACCTAGCAC | |
| | IgGIL10M13 | CCTGAGCGCTAGTGTGGGCGATAGAGTGA | |
| | | CTATCACCTGTAAAGCTCAGCTGTCTAGC | |
| | | CCAGGTCAGGGAACTCAGTCAGAGAATAG | |
| | | CTGCACTCACTTCCCCGGTAACCTGCCTA | |
| | | ATATGCTGAGAGATCTGAGGGACGCCTTC | |
| | | TCTAGGGTCAAGACCTTCTTTCAGATGAA | |
| | | GGATCAGCTGGATAACCTGCTGCTGAAAG | |
| | | AGTCACTGCTGGAGGACTTTAAGGGCTAC | |
| | | CTGGGCTGTCAGGCCCTGAGCGAGATGAT | |
| | | TCAGTTCTACCTGGAAGAAGTGATGCCCC | |
| | | AGGCCGAGAATCAGGACCCCGATATTAAG | |
| | | GCTCACGTGAACTCACTGGGCGAGAACCT | |
| | | GAAAACCCTGAGACTGAGGCTGAGGCGGT | |
| | | GTCACCGGTTTCTGCCCTGCGAGAACGGC | |
| | | GGAGGTAGCGGCGGTAAATCTAAGGCCGT | |
| | | GGAACAGGTCAAAAACGCCTTTAACAAGC | |
| | | TGCAGGAAAAGGGAATCTATAAGGCTATG | |
| | | AGCGAGTTCGACATCTTTATTAACTATAT | |
| | | CGAGGCCTATATGACTATGAAGATTAGGA | |
| | | ACGTGGGCTATATGCACTGGTATCAGCAG | |
| | | AAGCCCGGTAAAGCCCCTAAGCTGCTGAT | |
| | | CTACGACACCTCTAAGCTGGCTAGTGGCG | |
| | | TGCCCTCTAGGTTTAGCGGTAGCGGTAGT | |
| | | GGCACCGCCTTCACCCTGACTATCTCTAG | |
| | | CCTGCAGCCCGACGACTTCGCTACCTACT | |
| | | ACTGTTTTCAGGGTAGCGGCTACCCCTTC | |
| | | ACCTTCGGCGGAGGCACTAAGCTGGAGAT | |
| | | TAAG | |
| 3968 | Heavy Chain | CAGGTCACACTGAGAGAGTCAGGCCCTGC | |
| | of IgGIL10M13 | CCTGGTCAAGCCTACTCAGACCCTGACCC | |
| | | TGACCTGCACCTTTAGCGGCTTTAGCCTG | |
| | | AGCACTAGCGGAATGAGCGTGGGCTGGAT | |
| | | TAGACAGCCCCCTGGTAAAGCCCTGGAGT | |
| | | GGCTGGCCGATATTTGGTGGGACGATAAG | |
| | | AAGGACTATAACCCTAGCCTGAAGTCTAG | |
| | | GCTGACTATCTCTAAGGACACTAGCGCTA | |
| | | ATCAGGTGGTGCTGAAAGTGACTAATATG | |
| | | GACCCCGCCGACACCGCTACCTACTACTG | |
| | | CGCTAGATCTATGATCACTAACTGGTACT | |
| | | TCGACGTGTGGGGCGCTGGCACTACCGTG | |
| | | ACCGTGTCTAGCGCTAGCACTAAGGGCCC | |
| | | CTCCGTGTTCCCTCTGGCCCCTTCCAGCA | |
| | | AGTCTACCTCCGGCGGCACAGCTGCTCTG | |
| | | GGCTGCCTGGTCAAGGACTACTTCCCTGA | |
| | | GCCTGTGACAGTGTCCTGGAACTCTGGCG | |
| | | CCCTGACCTCTGGCGTGCACACCTTCCCT | |
| | | GCCGTGCTGCAGTCCTCCGGCCTGTACTC | |
| | | CCTGTCCTCCGTGGTCACAGTGCCTTCAA | |
| | | GCAGCCTGGGCACCCAGACCTATATCTGC | |
| | | AACGTGAACCACAAGCCTTCCAACACCAA | |
| | | GGTGGACAAGCGGGTGGAGCCTAAGTCCT | |
| | | GCGACAAGACCCACACCTGTCCTCCCTGC | |
| | | CCTGCTCCTGAACTGCTGGGCGGCCCTTC | |
| | | TGTGTTCCTGTTCCCTCCAAAGCCCAAGG | |
| | | ACACCCTGATGATCTCCCGGACCCCTGAA | |
| | | GTGACCTGCGTGGTGGTGGCCGTGTCCCA | |
| | | CGAGGATCCTGAAGTGAAGTTCAATTGGT | |
| | | ACGTGGACGGCGTGGAGGTGCACAACGCC | |
| | | AAGACCAAGCCTCGGGAGGAACAGTACAA | |
| | | CTCCACCTACCGGGTGGTGTCCGTGCTGA | |
| | | CCGTGCTGCACCAGGACTGGCTGAACGGC | |
| | | AAAGAGTACAAGTGCAAAGTCTCCAACAA | |
| | | GGCCCTGGCCGCCCCTATCGAAAAGACAA | |
| | | TCTCCAAGGCCAAGGGCCAGCCTAGGGAA | |
| | | CCCCAGGTGTACACCCTGCCACCCAGCCG | |
| | | GGAGGAAATGACCAAGAACCAGGTGTCCC | |
| | | TGACCTGTCTGGTCAAGGGCTTCTACCCT | |
| | | TCCGATATCGCCGTGGAGTGGGAGTCTAA | |
| | | CGGCCAGCCTGAGAACAACTACAAGACCA | |
| | | CCCCTCCTGTGCTGGACTCCGACGGCTCC | |
| | | TTCTTCCTGTACTCCAAACTGACCGTGGA | |
| | | CAAGTCCCGGTGGCAGCAGGGCAACGTGT | |
| | | TCTCCTGCTCCGTGATGCACGAGGCCCTG | |
| | | CACAACCACTACACCCAGAAGTCCCTGTC | |
| | | CCTGTCTCCCGGCAAG | |
| 3969 | Light Chain | GATATTCAGATGACTCAGTCACCTAGCAC | |
| | of IgGIL10M13 | CCTGAGCGCTAGTGTGGGCGATAGAGTGA | |
| | | CTATCACCTGTAAAGCTCAGCTGTCTAGC | |
| | | CCAGGTCAGGGAACTCAGTCAGAGAATAG | |
| | | CTGCACTCACTTCCCCGGTAACCTGCCTA | |
| | | ATATGCTGAGAGATCTGAGGGACGCCTTC | |
| | | TCTAGGGTCAAGACCTTCTTTCAGATGAA | |
| | | GGATCAGCTGGATAACCTGCTGCTGAAAG | |
| | | AGTCACTGCTGGAGGACTTTAAGGGCTAC | |
| | | CTGGGCTGTCAGGCCCTGAGCGAGATGAT | |
| | | TCAGTTCTACCTGGAAGAAGTGATGCCCC | |
| | | AGGCCGAGAATCAGGACCCCGATATTAAG | |
| | | GCTCACGTGAACTCACTGGGCGAGAACCT | |
| | | GAAAACCCTGAGACTGAGGCTGAGGCGGT | |
| | | GTCACCGGTTTCTGCCCTGCGAGAACGGC | |
| | | GGAGGTAGCGGCGGTAAATCTAAGGCCGT | |
| | | GGAACAGGTCAAAAACGCCTTTAACAAGC | |
| | | TGCAGGAAAAGGGAATCTATAAGGCTATG | |
| | | AGCGAGTTCGACATCTTTATTAACTATAT | |
| | | CGAGGCCTATATGACTATGAAGATTAGGA | |
| | | ACGTGGGCTATATGCACTGGTATCAGCAG | |
| | | AAGCCCGGTAAAGCCCCTAAGCTGCTGAT | |
| | | CTACGACACCTCTAAGCTGGCTAGTGGCG | |
| | | TGCCCTCTAGGTTTAGCGGTAGCGGTAGT | |
| | | GGCACCGCCTTCACCCTGACTATCTCTAG | |
| | | CCTGCAGCCCGACGACTTCGCTACCTACT | |
| | | ACTGTTTTCAGGGTAGCGGCTACCCCTTC | |
| | | ACCTTCGGCGGAGGCACTAAGCTGGAGAT | |
| | | TAAGCGTACGGTGGCCGCTCCCAGCGTGT | |
| | | TCATCTTCCCCCCCAGCGACGAGCAGCTG | |
| | | AAGAGCGGCACCGCCAGCGTGGTGTGCCT | |
| | | GCTGAACAACTTCTACCCCCGGGAGGCCA | |
| | | AGGTGCAGTGGAAGGTGGACAACGCCCTG | |
| | | CAGAGCGGCAACAGCCAGGAGAGCGTCAC | |
| | | CGAGCAGGACAGCAAGGACTCCACCTACA | |
| | | GCCTGAGCAGCACCCTGACCCTGAGCAAG | |
| | | GCCGACTACGAGAAGCATAAGGTGTACGC | |
| | | CTGCGAGGTGACCCACCAGGGCCTGTCCA | |
| | | GCCCCGTGACCAAGAGCTTCAACAGGGGC | |
| | | GAGTGC | |
| 3970 | Monomeric | AGTCCCGGTCAGGGAACTCAGTCAGAGAA | |
| | IL10 | TAGCTGCACTCACTTCCCCGGTAACCTGC | |
| | | CTAATATGCTGAGAGATCTGAGGGACGCC | |
| | | TTCTCTAGGGTCAAGACCTTCTTTCAGAT | |
| | | GAAGGATCAGCTGGATAACCTGCTGCTGA | |
| | | AAGAGTCACTGCTGGAGGACTTTAAGGGC | |
| | | TACCTGGGCTGTCAGGCCCTGAGCGAGAT | |
| | | GATTCAGTTCTACCTGGAAGAAGTGATGC | |
| | | CCCAGGCCGAGAATCAGGACCCCGATATT | |
| | | AAGGCTCACGTCAACTCACTGGGCGAGAA | |
| | | CCTGAAAACCCTGAGACTGAGGCTGAGGC | |
| | | GGTGTCACCGGTTTCTGCCCTGCGAGAAC | |
| | | GGCGGAGGTAGCGGCGGTAAATCTAAGGC | |
| | | CGTGGAACAGGTCAAAAACGCCTTTAACA | |
| | | AGCTGCAGGAAAAGGGAATCTATAAGGCT | |
| | | ATGAGCGAGTTCGACATCTTTATTAACTA | |
| | | TATCGAGGCCTATATGACTATGAAGATTA | |
| | | GGAAC | |
| 3971 | linker | GGGSGG | |
| 3972 | linker | GGGGS | |
| 3973 | linker | GGGGA | |

### Example 39: Antibody Cytokine Engrafted Proteins have Anti-Inflammatory Activity

[0437] Using an assay developed in support of rhIL10's pro-inflammatory activity in the clinic (Lauw et al., J Immunol. 2000; 165(5):2783-9), the pro-inflammatory activity of IgGIL10M13 in human whole blood was assessed. In order to assess pro-inflammatory activity, antibody cytokine engrafted proteins were profiled for their ability to induce interferon gamma (IFNγ) or granzyme B in activated primary human CD8 T cells. It was found that antibody cytokine engrafted proteins such as IgGIL10M13 demonstrated significantly less pro-inflammatory activity than recombinant human IL10 (rhIL10) as measured by IFNγ production. This data is shown in FIG. 51A. Similar results were found in assays measuring granzyme B (data not shown), as well as with other exemplary antibody cytokine engrafted proteins (IgGIL10M7). The significantly decreased pro-inflammatory activity demonstrated by IgGIL10M13 as compared to rhIL10 indicates it would be superior to rhIL10 for treating immune related disorders, as IgGIL10M13 could be administered over a broader dose range.

[0438] To examine anti-inflammatory activity, antibody cytokine engrafted proteins and rhIL10 were tested for their ability to inhibit LPS-induced TNFα in human whole blood. This data is shown in FIG. 51B, wherein increasing concentrations of either rhIL10 or IgGIL10M13 reduced TNFα production. Note that the rhIL10 and IgGIL10M13 curves are similar, indicating that both molecules had potent anti-inflammatory activity.

[0439] In summary, these results show that antibody cytokine engrafted proteins have the desired properties of having anti-inflammatory properties similar to IL10, but without the dose limiting, and unwanted pro-inflammatory properties.

### Example 40: IL10 Dependent Signaling

[0440] In vitro signaling studies in human PBMCs and whole blood indicate that antibody cytokine engrafted proteins such as IgGIL10M13 had a more specific signaling profile when compared to rhIL10. Using CyTOF, a FACS based method that utilizes mass spectrometry, antibody cytokine engrafted protein signaling in multiple different cell populations in whole blood was assessed by pSTAT3 detection (FIG. 52). Antibody cytokine engrafted proteins such IgGIL10M13 induced a pSTAT3 signal only on monocytes, macrophages and plasmacytoid dendritic cells above μM concentrations (up to 1.8 μM). All of these cell types are known to have increased expression of IL10 receptor. rhIL10 induced a pSTAT3 signal on monocytes, but also on additional cell types such as T cells, B cells, and NK cells. This was seen even at low nM concentrations of rhIL10. In whole blood treated with rhIL10 at a concentration of 100 nM, the strongest pSTAT3 signal was seen on monocytes and myeloid dendritic cells with additional moderate activation of T, NK, B cells, and Granulocytes. The functional consequences of pSTAT3 signaling leads to increased production of IFNγ and Granzyme B from CD8 T cells and NK cells. There is also proliferation of B cells in response to rhIL10 signaling. This pro-inflammatory activity of rhIL10 in human whole blood is observed at exposures less than 5-fold above the anti-inflammatory IC90. The more selective cellular profile of antibody cytokine engrafted proteins such as IgGIL10M13 resulted in reduced pro-inflammatory activity leading to better anti-inflammatory efficacy.

### Example 41: Antibody Cytokine Engrafted Protein Signaling in Various Species

[0441] rhIL10 potently inhibits LPS-induced pro-inflammatory cytokine production in human monocytes, PBMCs, and whole blood. The antibody cytokine engrafted protein IgGIL10M13 exhibits pM potency on target cells, although 10-fold less potent than rhIL10. Table 4 is a potency comparison for IL10 or IgGIL10M13 activity in human whole blood as well as whole blood of selected toxicity species.

[0442] Potency calculations are based on ex vivo whole blood assays from either mouse, cynomolgus monkey or human. For each species tested, IgGIL10M13 or rhIL10 were titrated and assessed for ability to inhibit LPS-induced TNFα production. IC50s were calculated as the level of molecule that gave rise to 50% inhibition of total TNFα signal. IC90s and IC30s were calculated taking into account Hill slope value for each assay with the following equation: log EC50=log ECF−(1/HillSlope)*lob(F/100-F)), where ECF is the concentration that gives a response of F percent of total TNFα signal.

TABLE 4

| | | IgGIL10M13 (CV %) | | IL10 (CV %) | |
|---|---|---|---|---|---|
| Mouse | IC30 | 2.2 | pM (pooled blood) | 0.57 | pM (pooled blood) |
| | IC50 | 12 | pM | 1.7 | pM |
| | IC90 | 108 | pM | 15 | pM |
| Cyno | IC30 | 4.13 | pM (48% n = 3) | 0.44 | pM (28% n = 3) |
| | IC50 | 6.67 | pM (53%) | 0.65 | pM (31%) |
| | IC90 | 24 | pM (73%) | 1.9 | pM (43%) |
| Human | IC30 | 10.8 | pM (76% n = 48) | 1.3 | pM (96% n = 48) |
| | IC50 | 25.2 | pM (76%) | 2.8 | pM (98%) |
| | IC90 | 262 | pM (94%) | 22.8 | pM (79%) |

### Example 42: Evaluation of Antibody Cytokine Engrafted Protein Pharmacokinetics

[0443] rhIL10 has a short half-life, limiting its target tissue exposure and requiring the patient to undergo multiple dosing. The half-life of antibody cytokine engrafted proteins was assessed in C57Bl/6 mice. Antibody cytokine engrafted proteins (e.g. IgGIL10M13) were injected at 0.2 mg/kg subcutaneously and blood was sampled beginning at 5 minutes post-injection up to 144 hours post-injection. IgGIL10M13 had a significant half-life extension of approximately 4.4 days (FIG. 53B) compared to rhIL10 which had a half-life of approximately 1 hr (FIG. 53A).

### Example 43: Evaluation of Antibody Cytokine Engrafted Protein Pharmacodynamics

[0444] Consistent with extended half-life, antibody cytokine engrafted proteins also demonstrated improved pharmacodynamics. Phospho-STAT3 (pSTAT3), a marker of IL10 receptor activation and signaling was monitored in mouse colon after subcutaneous dosing of IgGIL10M13. Enhanced pSTAT3 signal was detected in colon at least up to 72 hours post-dose, and absent by 144 hours post-dose. See FIG. 53C. This profile is a dramatic improvement over rhIL10, whose signal is absent by 24 hours post-dose. FIG. 53D depicts improved duration of in vivo response of IgGIL10M13 as compared to rhIL10 as measured by inhibition of TNFα in blood in response to LPS challenge following antibody cytokine engrafted protein dosing.

### Example 44: Efficacy of Antibody Cytokine Engrafted Proteins in a Mouse Model

[0445] A direct comparison of efficacy for TNFα inhibition after LPS challenge was performed. C57/BL6 mice were dosed subcutaneously with vehicle, or equimolar levels of IL10 at 110 nmol/mouse, calculated for both recombinant IL10 and IgGIL10M13. Mice were then challenged with LPS delivered intraperitoneally to assess IL10 dependent inhibition of TNFα levels. IgGIL10M13 demonstrated comparable efficacy to rhIL10 at the initial assessment time period of 0.5 hour, however, up to at least forty-eight hours post dosing, IgGIL10M13 sustained superior efficacy to rhIL10 as measured by TNFα production. This data is shown in FIG. 54.

### Example 45: Antibody Cytokine Engrafted Proteins have Improved Exposure

[0446] The peak serum concentration (Cmax) of antibody cytokine engrafted proteins was assessed in C57Bl/6 mice. Antibody cytokine engrafted proteins were injected at 0.2 mg/kg (10 ml/kg dose volume) in 0.9% saline subcutaneously and blood was sampled beginning at 1 hour post-injection and up to 144 hours post-injection. Whole blood was collected into heparin-treated tubes at each time point and centrifuged at 12,500 rpm for 10 minutes at 4° C. Plasma supernatant was collected and stored at −80° C. until all time points were collected. Antibody cytokine engrafted proteins levels in plasma were measured using two different immunoassay methods to enable detection of both the IL10 and antibody domains of the antibody cytokine engrafted protein. As shown in FIG. 55, the antibody cytokine engrafted protein (e.g. IgGIL10M13) maintained greater than 60% Cmax past 100 hours. In contrast, rhIL10 levels dropped below 20% Cmax within 3.5 hours.

### Example 46: Antibody Cytokine Engrafted Proteins Act Only on Certain Cell Types in Human Patients

[0447] CyTOF was run as previously described on immune cells from human healthy donors and patients with Crohn's disease. As shown in the graphs in FIG. 56, IgGIL10M13 stimulated only monocytes, and the stimulation as measured by pSTAT3 levels is comparable to rhIL10. Monocytes are the target cells for inflammatory related disorders such as Crohn's disease and Ulcerative Colitis and express very high levels of IL10 receptor. However, FIG. 56 also shows the unwanted pro-inflammatory effects of rhIL10, for example, the increased pSTAT3 signaling on CD4 T cells, CD8 T cells and NK cells. It is noteworthy that IgGIL10M13, does not display this unwanted pro-inflammatory effect either on normal human cells or in cells taken Crohn's disease patients. This demonstrates that IgGIL10M13 has a larger, safer therapeutic index as administration of the antibody cytokine engrafted protein will act only on the desired cell type and not on other cell types such as CD8 T cells which would only worsen immune related disorders such as Crohn's disease and Ulcerative Colitis.

### Example 47: IgGIL10M13 has Reduced Pro-Inflammatory Activity in PHA Stimulated Human Whole Blood Compared to rhIL10

[0448] Despite extensive clinical data linking genetic IL10 deficiency to IBD susceptibility, rhIL10 showed only mild efficacy in IBD clinical trials (Herfarth et al., Gut 2002: 50(2):146-147). Retrospective analyses of trial data suggest that rhIL10's efficacy was limited by its intrinsic pro-inflammatory activity such as enhanced production of IFNγ. As discussed previously, in human functional cell-based assays, rhIL10 signaling leads to production of IFNγ and Granzyme B from T cells and NK cells.

[0449] Whole blood was taken from patients with Crohn's Disease and the levels of IFNγ were measured after stimulation with rhIL10, IgGIL10M13 and PHA alone. This data is shown in FIGS. 57-61. Increasing doses of rhIL10 causes a sharp increase in IFNγ production, which then plateaus. In contrast, in treatment of these cells with IgGIL10M13 little to no production of IFNγ was seen, indicating that IgGIL10M13 did not induce, or induced only very low levels of IFNγ production from T cells or NK cells.

[0450] An additional titration experiment was performed with these patient donor samples. In this experiment, IL10 levels from the donor patient sera was measured and found to be in the range of 1.5 to 5 femtomolar (fM), although the scientific literature has reported that patient IL10 levels could be as high as 20 fM (Szkaradkiewicz et al., Arch. Immunol. Ther Exp 2009: 57(4):291-294). rhIL10 was administered to the donor patient cells at the fixed concentrations of 2 femtomolar (fM), 2 pM, 2 nM and 200 nM. To these fixed concentrations of rhIL10, increasing concentrations of the antibody cytokine engrafted protein IgGIL10M13 was administered, and IFNγ production assayed. The data is shown in FIG. 62. At the fixed concentrations of 2 fM and 2 pM, IgGIL10M13 competes with rhIL10 and reduced the production of IFNγ to baseline levels. At the fixed concentration of 2 nM, IFNγ production was reduced by nanomolar concentrations of IgGIL10M13. Finally, at the fixed excess concentration of 200 nM rhIL10, only very little reduction of IFNγ production by IgGIL10M13 was seen. This indicates that at physiological levels of IL10, IgGIL10M13 competed out IL10, reducing the production of IFNγ, and the unwanted pro-inflammatory effects.

### Example 48: Aggregation Properties of Antibody Cytokine Engrafted Proteins

[0451] In clinical trials for IBD, rhIL10 was observed to have a very short half-life; however simple Fc fusions to the IL10 dimer to extend half-life were not pursued given aggregation properties of such a molecule. FIG. 63 shows aggregation of both an IL10 wild type linked to an Fc and IL10 monomer linked to an Fc. However, as shown in FIG. 64, the antibody structure of the antibody cytokine engrafted protein prevents IL10 aggregation, thus promoting ease of administration. In addition, reducing aggregation has the benefit of reducing an immune reaction to the therapeutic, and the generation of anti-drug antibodies.

### Example 49: Retained Binding of Antibody Cytokine Engrafted Proteins

[0452] Palivizumab is an anti-RSV antibody, and was chosen as the antibody structure for cytokine engrafting. This antibody had the advantages of a known structure, and as its target was RSV, a non-human target. The choice of a non-human target was to insure that there would be no toxicity associated with the antibody cytokine engrafted protein binding to an off target human antigen. It was uncertain after engrafting IL10M into palivizumab, whether the final IL10 antibody cytokine engrafted protein would still bind the RSV target protein. As assayed by ELISA, the IL10 antibody cytokine engrafted protein still bound to RSV target protein, despite the presence of the IL10M. This data is shown in FIG. 65.

### Example 50: Structural Conformation of the Antibody Cytokine Engrafted Protein Results in Differential Activity Across Cell Types

[0453] Antibody cytokine engrafted proteins (e.g. IgGIL10M13) incorporates monomeric IL10 into the Light Chain CDR 1 of an antibody. Insertion of a 6 amino acid glycine-serine linker between helices D and E of IL10 renders the normally heterodimeric molecule incapable of domain swapping dimerization. As such, engrafting IL10M into an antibody results in an antibody cytokine engrafted protein with 2 monomeric IL10 molecules. However, due to flexibility of the antibody Fab arms, the angle and distance between the IL10 monomers is not fixed, as in the wild-type IL10 dimer, thus affecting its interaction with the IL10R1/R2 receptor complex. This is shown graphically in FIG. 66. Specifically, due to antibody engraftment, the angle of the engrafted IL10 dimer is larger and variable, rendering signal transduction less efficient on cells with lower expression levels of IL10R1 and R2 as found on the pro-inflammatory cell types such as CD4 and CD8 T cells, B cells and NK cells. In contrast, antibody cytokine engrafted proteins signal more efficiently on cells with high IL-10R1 and R2 expression such as monocytes. A class average negative stain EM study of IgGIL10M13 highlighted the additional flexibility and wider angle between monomers, confirming that the geometry is altered compared to rhIL10. The less restricted geometry of the IL10 dimer in IgGIL10M13 alters its interaction with IL10R complex. As a consequence, the structure of the IgGIL10M13 antibody cytokine engrafted protein results in the biological effect of only producing a productive signal on cell types with high levels of IL10R1 and R2 expression.

### Example 51: Crystal Structure of IgGIL10M13

[0454] The IgGIL10M13 Fab was concentrated to 16.2 mg/ml in 20 mM HEPES pH 8.0, 150 mM NaCl and used directly in hanging drop vapor diffusion crystallization trials. Crystallization screens were setup by mixing 0.2 μd of protein solution with 0.2 μd of reservoir solution and equilibrated against 50 μl of the same reservoir solutions. Crystals for data collection appeared after 3-4 weeks at 20° C. from a reservoir solution of 20% PEG3350, 200 mM magnesium acetate, pH 7.9. Prior to data collection, the crystals were soaked in reservoir solution supplemented with 20% ethylene glycol and flash cooled in liquid nitrogen. Diffraction data were collected at the ALS beamline 5.0.3 with an ADSC Quantum 315R detector. Data was indexed and scaled using the HKL2000 software package (Otwinowski and Minor. (1997) Methods in Enzymology, Volume 276: Macromolecular Crystallography, part A, p. 307-326). The data for the IgGIL10M13 Fab was processed to 2.40 Å in space group P2₁ with cell dimensions a=80.6 Å, b=104.7 Å, c=82.8 Å, alpha=90°, beta=115.3°, gamma=90°. The structure was solved by molecular replacement using PHASER (McCoy et al., (2007) J. Appl. Cryst. 40:658-674) with the palivizumab Fab structure (PDB code: 2HWZ) and monomeric IL10 structure (PDB Code: 1LK3 chain A) as search models. The top molecular replacement solution contained 2 molecules of the IgGIL10M13 Fab in the asymmetric unit. The final model was built in COOT (Emsley & Cowtan (2004) Acta Cryst. D60:2126-2132) and refined with PHENIX (Adams et al., (2010) Acta Cryst. D66, 213-221). The R_{work} and R_{free} values are 18.8% and 23.9% respectively with root-mean-square (r.m.s) deviation values from ideal bond lengths and bond angles were 0.005 Å and 0.882° respectively.

### Overall Structure

[0455] The IgGIL10M13 Fab crystallized with 2 molecules in the asymmetric unit, both with similar conformations. The electron density maps were similar for both molecules. The overall structure (FIG. 67A) shows that the Fab and grafted monomeric IL10 (IL10M) can adopt a collinear arrangement (Fab light chain in white, Fab heavy chain in black, IL10M in dark grey). FIG. 67B shows a closer view of the grafting point in CDR-L1. The three flanking CDR residues are show with dark grey sticks. Dashed lines illustrate portions of the structure which could not be fit in the model due to missing electron density, presumably due to structural flexibility in these areas. The two areas include 6 residues at N-terminus of IL10M just after the grafting point and 8 residues between helices 4 and 5 in IL10M which encompass the inserted 6 residue linker. There are also 3 pairs of hydrogen bonding interactions between the grafted IL10M molecule and portions of the Fab heavy chain (FIG. 67C). These include R138 and N104 (sidechain), R135 and D56 (sidechain), and N38 and K58 (backbone/sidechain).

### Example 52: ACE Proteins Using Alternative Scaffolds

[0456] ACE proteins were initially constructed using GFTX3b, an anti-RSV antibody, as the scaffold. However, ACE proteins were also constructed using GFTX, and anti-IgE antibody as an additional scaffold. As native IL10 signals as a homodimer, IL10 ACE proteins were constructed using IL10 in the same antibody “arm.” For example, IL10 was engrafted into the third CDR of the variable heavy chain (CDRH3) of the GFTX scaffold, resulting in an ACE molecule with an IL10 molecule in both CDRH3 “arms” of the antibody. In addition, ACE proteins were constructed with an IL10 molecule in the first CDR of the variable light chain (CDRL1) and an IL10 molecule in to CDRH3. This created an ACE protein with an IL10 cytokine engrafted into two separate and distinct locations within the GFTX scaffold. Both types of GFTX ACE proteins were compared to native IL10 cytokine and to IL10Fc fusion proteins.

[0457] Human whole blood was obtained from The Scripps Research Institute Normal Blood Donor Service. Whole blood donors were anonymized but were requested to be free of anti-inflammatory medication. After pick up, whole blood was kept at 37° C. for 1 hr prior to isolation as the assay was prepared. Whole blood was processed to PBMCs using Lymphoprep density gradient (STEMCELL, Cat #07851, Lot #12ISf11) by layering 15 ml of whole blood on 10 ml of gradient and centrifuged at 800×G for 20 minutes, no brake, at room temperature. PBMCs were collected from the density gradient interface and washed two times in medium. This was repeated for 50 ml of blood per donor. PBMCs were prepared at 2.2e6 cells/ml (100,000 cells/well in 384 well plate in 45 ul volume).

[0458] GFTX constructs and rhIL-10 (Biolegend) were thawed and diluted to a working solution of 1000 ng/mL [final in assay 100 ng/mL] in lymphocyte culture medium (RPMI 1640, 10% FBS, 50 μM BME, 10 mM Hepes, 0.1 mM NEAA, 1 mM Sodium Pyruvate, 2 mM glutamine, 1× Human Insulin Transferrin Selenium, 60 mg/ml Pen/100 mg/ml Strep). An 11 point dose titration was prepared using the working solution as the starting concentration and performing a 1:3 dilution for each subsequent concentration in medium. LPS (100 μg/ml stock) was prepared and thawed and kept on ice prior to assay.

[0459] Titration curves were prepared. For “no LPS” control wells, 45 μl/well of PBMCs was dispensed into respective wells of a 384 well plate and brought up to 50 μl with medium. For LPS stimulation, LPS was added to the 50 ml conical containing human PBMCs to a working concentration of 1.1 ng/ml [final in assay 1 ng/mL]. The PBMCs and the LPS was well mixed and then 45 μl/well was dispensed into designated wells on the plate followed by 5 μl/well of designated IL-10 formulations. Assay plate was well mixed and incubated for 20 hrs in a 37° C., 5% CO₂ incubator.

[0460] The following day, the assay plate was mixed centrifuged at 1400 rpm for 5 minutes at room temp. Supernatant (approximately 10 μl) was removed from each well and transferred to a 384 well proxy plate. For the HTRF assay, antibodies directed to TNFa were reconstituted 1:40 in Reconstitution buffer provided in the HTRF kit (Cisbio, Bedford Mass.). HTRF mix was then added to proxy wells (10 μl/well) and the proxy plate was incubated for 3 hours at room temperature in the dark. Samples were then analyzed for FRET towards the wavelength 665 nm. Data was normalized for each donor using the donor's lowest titration results as a baseline. LPS induction was calculated for each donor using the “no LPS” wells. Data was analyzed using nonlinear regression to calculate IC50s for each donor.

[0461] As shown in FIG. 68, IL10 antibody cytokine proteins that have IL10 engrafted into the same CDR (eg., CDRH1) show similar IC50 potencies to recombinant human IL10 (rhIL10) and IL-10 Fc fusions, either Fc wild type fusions or fusions containing an Fc silencing mutation (LALA or DAPA). In contrast, as shown in FIG. 69, where IL10 is engrafted into different CDRs (e.g., CDRL1 and CDRH1) in the same ACE protein, lower IC50 potencies are seen when compared to IL-10M Fc fusions (wild-type Fc or DAPA Fc).

[0462] Alternative scaffolds were also constructed for IL2. In contrast to IL10, IL2 can act as a monomer, so IL2 was engrafted into the same CDRs (e.g. CDRL3) and no ACE proteins were made where IL2 was engrafted into different CDRs of the same antibody (e.g., CDRL3 and CDRH1).

[0463] Pre-diabetic NOD females were administered low dose equimolar IL2 (5× weekly) or an IL2 ACE protein wherein IL2 was engrafted into CDRL3 (1×/weekly) by intraperitoneal injection. Five mice per group were taken down 7 days after the first dose, spleens processed to obtain single cell suspensions and washed in RPMI (10% FBS). Red blood cells were lysed with Red Blood Cell Lysis Buffer and cells counted for cell number and viability. FACS staining was performed under standard protocols using FACS buffer (1×PBS+0.5% BSA+0.05% sodium azide). Cells were stained with surface antibodies: Rat anti-mouse CD3-BV605 (BD Pharmingen #563004), Rat anti-mouse CD4-Pacific Blue (BD Pharmingen #558107), Rat antimouse CD8-PerCp (BD Pharmingen #553036), CD44 FITC (Pharmingen #553133) Rat anti-mouse CD25-APC (Ebioscience #17-0251), and subsequently fixed/permeabilized and stained for FoxP3 according to the Anti-Mouse/Rat FoxP3 Staining Set PE (Ebioscience #72-5775). Cells were analyzed on the BD LSR Fortessa® or BD FACS LSR II, and data analyzed with FlowJo® software.

[0464] As shown in FIG. 70A, the IL2 ACE protein (GFTXIL3_IL-2) expands CD8+T effectors more effectively than recombinant human IL2 (hIL-2). An IL2 ACE protein with an Fc silent modification (GFTXL3LALA_IL2) also expands expands CD8+T effectors more effectively than recombinant human IL2. FIG. 70B demonstrates that the IL2 ACE protein (GFTXIL3_IL-2) expands CD4+ Treg cells more effectively than recombinant human IL2 (hIL-2). The effect on NK cells is shown in FIG. 70C, where recombinant human IL2 expands NK cells more effectively than IL2 ACE proteins either with or without Fc silencing mutations. In summary, this data shows that IL2 ACE proteins can be effective using a different antibody scaffold.

### Example 53: Cytof Data of ACE Proteins

[0465] CyTOF, a FACS based method that combines mass cytometry, incorporates flow cytometry technology with a time-of-flight inductively coupled plasma mass spectrometry (ICP-MS). It allows for the simultaneous detection and quantification of over 40 parameters from a single cell. It utilizes rare-earth metal conjugated monoclonal antibodies to specific cell surface or intracellular molecules. Using CyTOF, in vitro signaling studies were performed on ACE proteins in human PBMCs assessed by pSTAT1, pSTAT3, pSTAT4, and pSTAT5 detection.

[0466] Human PBMCs were treated with the wild type antibody used for the scaffold of the ACE protein or the respective ACE protein. The native cytokine (e.g., IL3) was also included as a control if available. The cells were fixed with 1.6% PFA to preserve phosphorylation status on signaling molecules. The cells were then stained with a combination of cell surfaces receptors for specific lineages and intracellular signaling molecules of the JAK/Stat pathway. The samples were then acquired and analyzed on the CyTOF. Results for each ACE protein are shown in FIGS. 71-100.

### Example 54: Flt3L Grafts Inducing DC Differentiation

[0467] Mouse bone marrow from C57/BL6 mice was isolated by flushing femur and tibia bones with complete RPMI media (10% FBS, Pen/Step, Non-essential amino acids, sodium pyruvate, HEPES and Beta mercapto ethanol). Bone marrow was pelleted by centrifugation and red blood cells were lysed by addition of ACK lysis buffer (ThermoFisher #A1049201). Cells were plated at 2×10⁶ per mL in complete RPMI with recombinant human Flt3L (Peprotech #300-19-50UG) at 10.53 nM or molar equivalent doses of H1, H3 or L3 human Flt3L grafts and cultured for 5 days at 37° C. Cells were harvested by pipetting for flow cytometric analysis and stained with antibodies to CD103 (Biolegend #121422), CD11b (Biolegend #101257), CD11c (Biolegend #117306), MHCII (Biolegend #107628), CD370 (Biolegend #143504) and B220 (BD #552772). FACS staining was performed under standard protocols using FACS buffer (1×PBS+2% FBS+0.5 mM EDTA). FIG. 101 shows that H1, H3 and L3 Flt3L grafts are capable of inducing B220+CD11c+ plasmacytoid DC differentiation (top panels) and CD370+DC1 differentiation (bottom panels) comparable to what is observed with recombinant human Flt3L.

### Example 55: GM-CSF Grafts Inducing DC Differentiation

[0468] Human CD14+ monocytes were isolated from a leukapheresis using positive selection (Stem cell Technologies #17858). In order to induce monocyte dendritic cell (DC) differentiation, cells were cultured in duplicate in the presence of 20 ng/mL of recombinant human IL-4 (Peprotech #200-04-100UG) and varying concentrations of recombinant human GM-CSF (Peprotech #300-03-100UG) or GM-CSF grafts in complete RPMI (10% FBS, Pen/Step, Non-essential amino acids, sodium pyruvate, HEPES and Beta mercapto ethanol). Ungrafted palivizumab was used as a control (graft scaffold control).

[0469] After 6 days in culture at 37° C., cells were harvested and stained for flow cytometric analysis for CD16 (Biolegend #302032), HLA-DR (Biolegend 307644), CD86 (Biolegend #305414), DC-SIGN (Biolegend #330106), CD24 (Biolegend #311134), CD80 (Biolegend #305218), CD40 (Biolegend 313008), CD11c (eBioscience #56-0116-42) and CD14 (BD #557831). FACS staining was performed under standard protocols using FACS buffer (1×PBS+2% FBS+0.5 mM EDTA)

[0470] For R848 stimulation, cells were cultured for 6 days as described above (3.9 nM GM-CSF was used for recombinant human GM-CSF and GM-CSF grafts). GM-CSF and IL-4 media was washed off and cells were incubated with R848 (in house generated) in varying concentrations in complete RMPI overnight. The following morning, cells were stained for flow cytometric analysis as described above. FIG. 102 shows that GM-CSF cytokine grafts are capable of inducing monocyte DC differentiation as evidenced by upregulation of DC-SIGN on the cells and downregulation of CD14. FIG. 103 shows that monocyte DCs generated with GM-CSF grafts are capable of responding to TLR7/8 activation.

[0471] It is understood that the examples and embodiments described herein are for illustrative purposes and that various modifications or changes in light thereof will be suggested to persons skilled in the art and are to be included within the spirit and purview of this application and scope of the appended claims. All publications, sequence accession numbers, patents, and patent applications cited herein are hereby incorporated by reference in their entirety for all purposes.

LENGTHY TABLES
The patent application contains a lengthy table section. A copy of the table is available in electronic form from the USPTO web site (https://seqdata.uspto.gov/?pageRequest=docDetail&DocID=US20200362058A1). An electronic copy of the table will also be available from the USPTO upon request and payment of the fee set forth in 37 CFR 1.19(b)(3).

1. An antibody cytokine engrafted (ACE) protein comprising:
(a) a heavy chain variable region (VH), comprising Complementarity Determining Regions (CDR) HCDR1, HCDR2, HCDR3; and
(b) a light chain variable region (VL), comprising LCDR1, LCDR2, LCDR3; and
(c) a cytokine molecule engrafted into a CDR of the VH or the VL,
wherein the cytokine molecule is directly engrafted into the CDR, and wherein the cytokine molecule is not interleukin-10 (IL-10).

2. The ACE protein of claim 1, wherein the cytokine molecule is engrafted into a heavy chain CDR.

3. (canceled)

4. The ACE protein of claim 1, wherein the cytokine molecule is engrafted into a light chain CDR.

5. (canceled)

6. (canceled)

7. The ACE protein of claim 1, wherein the cytokine molecule is a molecule selected from Table 1.

8. The ACE protein of claim 1, further comprising an IgG class antibody heavy chain.

9. (canceled)

10. (canceled)

11. (canceled)

12. (canceled)

13. (canceled)

14. (canceled)

15. (canceled)

16. (canceled)

17. (canceled)

18. (canceled)

19. (canceled)

20. (canceled)

21. (canceled)

22. (canceled)

23. (canceled)

24. The ACE protein of claim 1,
wherein the differential binding affinity or avidity of the engrafted cytokine molecule to two or more receptors is changed in comparison to a free cytokine molecule.

25. The ACE protein of claim 1,
wherein an activity of the engrafted cytokine molecule is increased in comparison to a free cytokine molecule.

26. The ACE protein of claim 1,
wherein an activity of the engrafted cytokine molecule is decreased in comparison to a free cytokine molecule.

27. (canceled)

28. The ACE protein of claim 1 comprising:
a heavy chain variable region that comprises: (a) a HCDR1, (b) a HCDR2, and (c) a HCDR3, wherein each of the HCDR sequences are set forth in TABLE 2, and
a light chain variable region that comprises: (d) a LCDR1, (e) a LCDR2, and (f) a LCDR3, wherein each of the LCDR sequences are set forth in TABLE 2,
wherein a cytokine molecule is engrafted into a CDR.

29. The ACE protein of claim 1 comprising:
a heavy chain variable region (VH) that comprises a VH set forth in TABLE 2, and
a light chain variable region (VL) that comprises a VL set forth in TABLE 2,
wherein a cytokine molecule is engrafted into a VH or VL.

30. The ACE protein of claim 1, further comprising a modified Fc region corresponding with reduced effector function.

31. The ACE protein of claim 30, wherein the modified Fc region comprises a mutation selected from one or more of D265A, P329A, P329G, N297A, L234A, and L235A.

32. (canceled)

33. (canceled)

34. An isolated nucleic acid encoding an ACE protein comprising:
a heavy chain variable region as set forth in TABLE 2, and
a light chain variable region as set forth in TABLE 2,
wherein a cytokine molecule is engrafted into the heavy chain variable region or the light chain variable region.

35. A recombinant host cell suitable for the production of an ACE protein, comprising the isolated nucleic acid of claim 34, and optionally, a secretion signal.

36. (canceled)

37. (canceled)

38. A pharmaceutical composition comprising the ACE protein of claim 1 and a pharmaceutically acceptable carrier.

39. A method of treating a disease in an individual in need thereof, comprising administering to the individual a therapeutically effective amount of the pharmaceutical composition of claim 38.

40. The method of claim 39, wherein the disease is a cancer.

41. The method of claim 40, wherein the cancer is selected from the group consisting of: melanoma, lung cancer, colorectal cancer, prostate cancer, breast cancer and lymphoma.

42. The method of claim 39, wherein the pharmaceutical composition is administered in combination with another therapeutic agent.

43. The method of claim 42, wherein the therapeutic agent is an immune checkpoint inhibitor.

44. The method of claim 43, wherein the immune checkpoint is selected from the group consisting of: PD-1, PD-L1, PD-L2, TIM3, CTLA-4, LAG-3, CEACAM-1, CEACAM-5, VISTA, BTLA, TIGIT, LAIR1, CD160, 2B4, and TGFR.

45. (canceled)

46. (canceled)

47. The method of claim 39, wherein the disease is an immune related disorder.

48. The method of claim 47, wherein the immune related disorder is selected from the group consisting of: inflammatory bowel disease, Crohn's disease, ulcerative colitis, rheumatoid arthritis, psoriasis, type I diabetes, acute pancreatitis, uveitis, Sjogren's disease, Behcet's disease, sarcoidosis, graft versus host disease (GVHD), System Lupus Erythematosus, Vitiligo, chronic prophylactic acute graft versus host disease (pGvHD), HIV-induced vasculitis, Alopecia areata, Systemic sclerosis morphoea, and primary anti-phospholipid syndrome.

49. The method of claim 47,
wherein the pharmaceutical composition is administered in combination with another therapeutic agent.

50. The method of claim 49, wherein the therapeutic agent is an anti-TNF agent selected from the group consisting of: infliximab, adalimumab, certolizumab, golimumab, natalizumab, and vedolizumab; an aminosalicylate agent selected from the group consisting of: sulfasalazine, mesalamine, balsalazide, olsalazine and other derivatives of 5-aminosalicylic acid; a corticosteroid selected from the group consisting of: methylprednisolone, hydrocortisone, prednisone, budenisonide, mesalamine, and dexamethasone; or an antibacterial agent.

51. (canceled)

52. (canceled)

53. (canceled)

54. (canceled)

55. (canceled)

56. (canceled)

57. (canceled)

58. (canceled)

59. (canceled)

60. (canceled)

61. (canceled)

62. (canceled)

63. (canceled)

64. (canceled)

65. (canceled)

The application's sequence listing, which the Patent Office published only in electronic form, follows.

SEQUENCE LISTING (3979 sequences)

SEQ ID NO: 1 - protein, 136 aa, Artificial Sequence
  source: /note="Description of Artificial Sequence: Synthetic polypeptide"
KCDITLQEIIKTLNSLTEQKTLCTELTVTDIFAASKNTTEKETFCRAATVLRQFYSHHEKDTRCLGATAQQFHRHKQLIRFLKRLDRNLWGLAGLNSCPVKEANQSTLENFLERLKTIMREKYSKCSSSTSGMSVG

SEQ ID NO: 2 - protein, 16 aa, Artificial Sequence
  source: /note="Description of Artificial Sequence: Synthetic peptide"
DIWWDDKKDYNPSLKS

SEQ ID NO: 3 - protein, 10 aa, Artificial Sequence
  source: /note="Description of Artificial Sequence: Synthetic peptide"
SMITNWYFDV

SEQ ID NO: 4 - protein, 138 aa, Artificial Sequence
  source: /note="Description of Artificial Sequence: Synthetic polypeptide"
GFSLHKCDITLQEIIKTLNSLTEQKTLCTELTVTDIFAASKNTTEKETFCRAATVLRQFYSHHEKDTRCLGATAQQFHRHKQLIRFLKRLDRNLWGLAGLNSCPVKEANQSTLENFLERLKTIMREKYSKCSSSTSGM

SEQ ID NO: 5 - protein, 5 aa, Artificial Sequence
  source: /note="Description of Artificial Sequence: Synthetic peptide"
WWDDK

SEQ ID NO: 6 - protein, 10 aa, Artificial Sequence
  source: /note="Description of Artificial Sequence: Synthetic peptide"
SMITNWYFDV

SEQ ID NO: 7 - protein, 249 aa, Artificial Sequence
  source: /note="Description of Artificial Sequence: Synthetic polypeptide"
QVTLRESGPALVKPTQTLTLTCTFSGFSLHKCDITLQEIIKTLNSLTEQKTLCTELTVTDIFAASKNTTEKETFCRAATVLRQFYSHHEKDTRCLGATAQQFHRHKQLIRFLKRLDRNLWGLAGLNSCPVKEANQSTLENFLERLKTIMREKYSKCSSSTSGMSVGWIRQPPGKALEWLADIWWDDKKDYNPSLKSRLTISKDTSKNQVVLKVTNMDPADTATYYCARSMITNWYFDVWGAGTTVTVSS

SEQ ID NO: 8 - protein, 579 aa, Artificial Sequence
  source: /note="Description of Artificial Sequence: Synthetic polypeptide"
QVTLRESGPALVKPTQTLTLTCTFSGFSLHKCDITLQEIIKTLNSLTEQKTLCTELTVTDIFAASKNTTEKETFCRAATVLRQFYSHHEKDTRCLGATAQQFHRHKQLIRFLKRLDRNLWGLAGLNSCPVKEANQSTLENFLERLKTIMREKYSKCSSSTSGMSVGWIRQPPGKALEWLADIWWDDKKDYNPSLKSRLTISKDTSKNQVVLKVTNMDPADTATYYCARSMITNWYFDVWGAGTTVTVSSASTKGPSVFPLAPSSKSTSGGTAALGCLVKDYFPEPVTVSWNSGALTSGVHTFPAVLQSSGLYSLSSVVTVPSSSLGTQTYICNVNHKPSNTKVDKRVEPKSCDKTHTCPPCPAPELLGGPSVFLFPPKPKDTLMISRTPEVTCVVVAVSHEDPEVKFNWYVDGVEVHNAKTKPREEQYNSTYRVVSVLTVLHQDWLNGKEYKCKVSNKALAAPIEKTISKAKGQPREPQVYTLPPSREEMTKNQVSLTCLVKGFYPSDIAVEWESNGQPENNYKTTPPVLDSDGSFFLYSKLTVDKSRWQQGNVFSCSVMHEALHNHYTQKSLSLSPGK

SEQ ID NO: 9 - protein, 10 aa, Artificial Sequence
  source: /note="Description of Artificial Sequence: Synthetic peptide"
KAQLSVGYMH

SEQ ID NO: 10 - protein, 7 aa, Artificial Sequence
  source: /note="Description of Artificial Sequence: Synthetic peptide"
DTSKLAS

SEQ ID NO: 11 - protein, 9 aa, Artificial Sequence
  source: /note="Description of Artificial Sequence: Synthetic peptide"
FQGSGYPFT

SEQ ID NO: 12 - protein, 6 aa, Artificial Sequence
  source: /note="Description of Artificial Sequence: Synthetic peptide"
QLSVGY

SEQ ID NO: 13 - protein, 3 aa, Artificial Sequence
  source: /note="Description of Artificial Sequence: Synthetic peptide"
DTS

SEQ ID NO: 14 - protein, 6 aa, Artificial Sequence
  source: /note="Description of Artificial Sequence: Synthetic peptide"
GSGYPF

SEQ ID NO: 15 - protein, 106 aa, Artificial Sequence
  source: /note="Description of Artificial Sequence: Synthetic polypeptide"
DIQMTQSPSTLSASVGDRVTITCKAQLSVGYMHWYQQKPGKAPKLLIYDTSKLASGVPSRFSGSGSGTEFTLTISSLQPDDFATYYCFQGSGYPFTFGGGTKLEIK

SEQ ID NO: 16 - protein, 213 aa, Artificial Sequence
  source: /note="Description of Artificial Sequence: Synthetic polypeptide"
DIQMTQSPSTLSASVGDRVTITCKAQLSVGYMHWYQQKPGKAPKLLIYDTSKLASGVPSRFSGSGSGTEFTLTISSLQPDDFATYYCFQGSGYPFTFGGGTKLEIKRTVAAPSVFIFPPSDEQLKSGTASVVCLLNNFYPREAKVQWKVDNALQSGNSQESVTEQDSKDSTYSLSSTLTLSKADYEKHKVYACEVTHQGLSSPVTKSFNRGEC

SEQ ID NO: 17 - protein, 7 aa, Artificial Sequence
  source: /note="Description of Artificial Sequence: Synthetic peptide"
TSGMSVG

SEQ ID NO: 18 - protein, 145 aa, Artificial Sequence
  source: /note="Description of Artificial Sequence: Synthetic polypeptide"
DIWWDHKCDITLQEIIKTLNSLTEQKTLCTELTVTDIFAASKNTTEKETFCRAATVLRQFYSHHEKDTRCLGATAQQFHRHKQLIRFLKRLDRNLWGLAGLNSCPVKEANQSTLENFLERLKTIMREKYSKCSSDKKDYNPSLKS

SEQ ID NO: 19 - protein, 10 aa, Artificial Sequence
  source: /note="Description of Artificial Sequence: Synthetic peptide"
SMITNWYFDV

SEQ ID NO: 20 - protein, 9 aa, Artificial Sequence
  source: /note="Description of Artificial Sequence: Synthetic peptide"
GFSLSTSGM

SEQ ID NO: 21 - protein, 134 aa, Artificial Sequence
  source: /note="Description of Artificial Sequence: Synthetic polypeptide"
WWDHKCDITLQEIIKTLNSLTEQKTLCTELTVTDIFAASKNTTEKETFCRAATVLRQFYSHHEKDTRCLGATAQQFHRHKQLIRFLKRLDRNLWGLAGLNSCPVKEANQSTLENFLERLKTIMREKYSKCSSDK

SEQ ID NO: 22 - protein, 10 aa, Artificial Sequence
  source: /note="Description of Artificial Sequence: Synthetic peptide"
SMITNWYFDV

SEQ ID NO: 23 - protein, 249 aa, Artificial Sequence
  source: /note="Description of Artificial Sequence: Synthetic polypeptide"
QVTLRESGPALVKPTQTLTLTCTFSGFSLSTSGMSVGWIRQPPGKALEWLADIWWDHKCDITLQEIIKTLNSLTEQKTLCTELTVTDIFAASKNTTEKETFCRAATVLRQFYSHHEKDTRCLGATAQQFHRHKQLIRFLKRLDRNLWGLAGLNSCPVKEANQSTLENFLERLKTIMREKYSKCSSDKKDYNPSLKSRLTISKDTSKNQVVLKVTNMDPADTATYYCARSMITNWYFDVWGAGTTVTVSS

SEQ ID NO: 24 - protein, 579 aa, Artificial Sequence
  source: /note="Description of Artificial Sequence: Synthetic polypeptide"
QVTLRESGPALVKPTQTLTLTCTFSGFSLSTSGMSVGWIRQPPGKALEWLADIWWDHKCDITLQEIIKTLNSLTEQKTLCTELTVTDIFAASKNTTEKETFCRAATVLRQFYSHHEKDTRCLGATAQQFHRHKQLIRFLKRLDRNLWGLAGLNSCPVKEANQSTLENFLERLKTIMREKYSKCSSDKKDYNPSLKSRLTISKDTSKNQVVLKVTNMDPADTATYYCARSMITNWYFDVWGAGTTVTVSSASTKGPSVFPLAPSSKSTSGGTAALGCLVKDYFPEPVTVSWNSGALTSGVHTFPAVLQSSGLYSLSSVVTVPSSSLGTQTYICNVNHKPSNTKVDKRVEPKSCDKTHTCPPCPAPELLGGPSVFLFPPKPKDTLMISRTPEVTCVVVAVSHEDPEVKFNWYVDGVEVHNAKTKPREEQYNSTYRVVSVLTVLHQDWLNGKEYKCKVSNKALAAPIEKTISKAKGQPREPQVYTLPPSREEMTKNQVSLTCLVKGFYPSDIAVEWESNGQPENNYKTTPPVLDSDGSFFLYSKLTVDKSRWQQGNVFSCSVMHEALHNHYTQKSLSLSPGK

SEQ ID NO: 25 - protein, 10 aa, Artificial Sequence
  source: /note="Description of Artificial Sequence: Synthetic peptide"
KAQLSVGYMH

SEQ ID NO: 26 - protein, 7 aa, Artificial Sequence
  source: /note="Description of Artificial Sequence: Synthetic peptide"
DTSKLAS

SEQ ID NO: 27 - protein, 9 aa, Artificial Sequence
  source: /note="Description of Artificial Sequence: Synthetic peptide"
FQGSGYPFT

SEQ ID NO: 28 - protein, 6 aa, Artificial Sequence
  source: /note="Description of Artificial Sequence: Synthetic peptide"
QLSVGY

SEQ ID NO: 29 - protein, 3 aa, Artificial Sequence
  source: /note="Description of Artificial Sequence: Synthetic peptide"
DTS

SEQ ID NO: 30 - protein, 6 aa, Artificial Sequence
  source: /note="Description of Artificial Sequence: Synthetic peptide"
GSGYPF

SEQ ID NO: 31 - protein, 106 aa, Artificial Sequence; identical to SEQ ID NO: 15
  source: /note="Description of Artificial Sequence: Synthetic polypeptide"

SEQ ID NO: 32 - protein, 213 aa, Artificial Sequence; identical to SEQ ID NO: 16
  source: /note="Description of Artificial Sequence: Synthetic polypeptide"

SEQ ID NO: 33 - protein, 7 aa, Artificial Sequence
  source: /note="Description of Artificial Sequence: Synthetic peptide"
TSGMSVG

SEQ ID NO: 34 - protein, 16 aa, Artificial Sequence
  source: /note="Description of Artificial Sequence: Synthetic peptide"
DIWWDDKKDYNPSLKS

SEQ ID NO: 35 - protein, 139 aa, Artificial Sequence
  source: /note="Description of Artificial Sequence: Synthetic polypeptide"
SMITHKCDITLQEIIKTLNSLTEQKTLCTELTVTDIFAASKNTTEKETFCRAATVLRQFYSHHEKDTRCLGATAQQFHRHKQLIRFLKRLDRNLWGLAGLNSCPVKEANQSTLENFLERLKTIMREKYSKCSSNWYFDV

SEQ ID NO: 36 - protein, 9 aa, Artificial Sequence
  source: /note="Description of Artificial Sequence: Synthetic peptide"
GFSLSTSGM

SEQ ID NO: 37 - protein, 5 aa, Artificial Sequence
  source: /note="Description of Artificial Sequence: Synthetic peptide"
WWDDK

SEQ ID NO: 38 - protein, 139 aa, Artificial Sequence; identical to SEQ ID NO: 35
  source: /note="Description of Artificial Sequence: Synthetic polypeptide"

SEQ ID NO: 39 - protein, 249 aa, Artificial Sequence
  source: /note="Description of Artificial Sequence: Synthetic polypeptide"
QVTLRESGPALVKPTQTLTLTCTFSGFSLSTSGMSVGWIRQPPGKALEWLADIWWDDKKDYNPSLKSRLTISKDTSANQVVLKVTNMDPADTATYYCARSMITHKCDITLQEIIKTLNSLTEQKTLCTELTVTDIFAASKNTTEKETFCRAATVLRQFYSHHEKDTRCLGATAQQFHRHKQLIRFLKRLDRNLWGLAGLNSCPVKEANQSTLENFLERLKTIMREKYSKCSSNWYFDVWGAGTTVTVSS

SEQ ID NO: 40 - protein, 579 aa, Artificial Sequence
  source: /note="Description of Artificial Sequence: Synthetic polypeptide"
QVTLRESGPALVKPTQTLTLTCTFSGFSLSTSGMSVGWIRQPPGKALEWLADIWWDDKKDYNPSLKSRLTISKDTSANQVVLKVTNMDPADTATYYCARSMITHKCDITLQEIIKTLNSLTEQKTLCTELTVTDIFAASKNTTEKETFCRAATVLRQFYSHHEKDTRCLGATAQQFHRHKQLIRFLKRLDRNLWGLAGLNSCPVKEANQSTLENFLERLKTIMREKYSKCSSNWYFDVWGAGTTVTVSSASTKGPSVFPLAPSSKSTSGGTAALGCLVKDYFPEPVTVSWNSGALTSGVHTFPAVLQSSGLYSLSSVVTVPSSSLGTQTYICNVNHKPSNTKVDKRVEPKSCDKTHTCPPCPAPELLGGPSVFLFPPKPKDTLMISRTPEVTCVVVAVSHEDPEVKFNWYVDGVEVHNAKTKPREEQYNSTYRVVSVLTVLHQDWLNGKEYKCKVSNKALAAPIEKTISKAKGQPREPQVYTLPPSREEMTKNQVSLTCLVKGFYPSDIAVEWESNGQPENNYKTTPPVLDSDGSFFLYSKLTVDKSRWQQGNVFSCSVMHEALHNHYTQKSLSLSPGK

SEQ ID NO: 41 - protein, 10 aa, Artificial Sequence
  source: /note="Description of Artificial Sequence: Synthetic peptide"
KAQLSVGYMH

SEQ ID NO: 42 - protein, 7 aa, Artificial Sequence
  source: /note="Description of Artificial Sequence: Synthetic peptide"
DTSKLAS

SEQ ID NO: 43 - protein, 9 aa, Artificial Sequence
  source: /note="Description of Artificial Sequence: Synthetic peptide"
FQGSGYPFT

SEQ ID NO: 44 - protein, 6 aa, Artificial Sequence
  source: /note="Description of Artificial Sequence: Synthetic peptide"
QLSVGY

SEQ ID NO: 45 - protein, 3 aa, Artificial Sequence
  source: /note="Description of Artificial Sequence: Synthetic peptide"
DTS

SEQ ID NO: 46 - protein, 6 aa, Artificial Sequence
  source: /note="Description of Artificial Sequence: Synthetic peptide"
GSGYPF

SEQ ID NO: 47 - protein, 106 aa, Artificial Sequence; identical to SEQ ID NO: 15
  source: /note="Description of Artificial Sequence: Synthetic polypeptide"

SEQ ID NO: 48 - protein, 213 aa, Artificial Sequence; identical to SEQ ID NO: 16
  source: /note="Description of Artificial Sequence: Synthetic polypeptide"

SEQ ID NO: 49 - protein, 7 aa, Artificial Sequence
  source: /note="Description of Artificial Sequence: Synthetic peptide"
TSGMSVG

SEQ ID NO: 50 - protein, 15 aa, Artificial Sequence
  source: /note="Description of Artificial Sequence: Synthetic peptide"
DIWWDDKKDYNPSLK

SEQ ID NO: 51 - protein, 10 aa, Artificial Sequence
  source: /note="Description of Artificial Sequence: Synthetic peptide"
SMITNWYFDV

SEQ ID NO: 52 - protein, 9 aa, Artificial Sequence
  source: /note="Description of Artificial Sequence: Synthetic peptide"
GFSLSTSGM

SEQ ID NO: 53 - protein, 5 aa, Artificial Sequence
  source: /note="Description of Artificial Sequence: Synthetic peptide"
WWDDK

SEQ ID NO: 54 - protein, 10 aa, Artificial Sequence
  source: /note="Description of Artificial Sequence: Synthetic peptide"
SMITNWYFDV

SEQ ID NO: 55 - protein, 120 aa, Artificial Sequence
  source: /note="Description of Artificial Sequence: Synthetic polypeptide"
QVTLRESGPALVKPTQTLTLTCTFSGFSLSTSGMSVGWIRQPPGKALEWLADIWWDDKKDYNPSLKSRLTISKDTSANQVVLKVTNMDPADTATYYCARSMITNWYFDVWGAGTTVTVSS

SEQ ID NO: 56 - protein, 450 aa, Artificial Sequence
  source: /note="Description of Artificial Sequence: Synthetic polypeptide"
QVTLRESGPALVKPTQTLTLTCTFSGFSLSTSGMSVGWIRQPPGKALEWLADIWWDDKKDYNPSLKSRLTISKDTSANQVVLKVTNMDPADTATYYCARSMITNWYFDVWGAGTTVTVSSASTKGPSVFPLAPSSKSTSGGTAALGCLVKDYFPEPVTVSWNSGALTSGVHTFPAVLQSSGLYSLSSVVTVPSSSLGTQTYICNVNHKPSNTKVDKRVEPKSCDKTHTCPPCPAPELLGGPSVFLFPPKPKDTLMISRTPEVTCVVVAVSHEDPEVKFNWYVDGVEVHNAKTKPREEQYNSTYRVVSVLTVLHQDWLNGKEYKCKVSNKALAAPIEKTISKAKGQPREPQVYTLPPSREEMTKNQVSLTCLVKGFYPSDIAVEWESNGQPENNYKTTPPVLDSDGSFFLYSKLTVDKSRWQQGNVFSCSVMHEALHNHYTQKSLSLSPGK

SEQ ID NO: 57 - protein, 139 aa, Artificial Sequence
  source: /note="Description of Artificial Sequence: Synthetic polypeptide"
KAQLSHKCDITLQEIIKTLNSLTEQKTLCTELTVTDIFAASKNTTEKETFCRAATVLRQFYSHHEKDTRCLGATAQQFHRHKQLIRFLKRLDRNLWGLAGLNSCPVKEANQSTLENFLERLKTIMREKYSKCSSVGYMH

SEQ ID NO: 58 - protein, 7 aa, Artificial Sequence
  source: /note="Description of Artificial Sequence: Synthetic peptide"
DTSKLAS

SEQ ID NO: 59 - protein, 9 aa, Artificial Sequence
  source: /note="Description of Artificial Sequence: Synthetic peptide"
FQGSGYPFT

SEQ ID NO: 60 - protein, 135 aa, Artificial Sequence
  source: /note="Description of Artificial Sequence: Synthetic polypeptide"
QLSHKCDITLQEIIKTLNSLTEQKTLCTELTVTDIFAASKNTTEKETFCRAATVLRQFYSHHEKDTRCLGATAQQFHRHKQLIRFLKRLDRNLWGLAGLNSCPVKEANQSTLENFLERLKTIMREKYSKCSSVGY

SEQ ID NO: 61 - protein, 3 aa, Artificial Sequence
  source: /note="Description of Artificial Sequence: Synthetic peptide"
DTS

SEQ ID NO: 62 - protein, 6 aa, Artificial Sequence
  source: /note="Description of Artificial Sequence: Synthetic peptide"
GSGYPF

SEQ ID NO: 63 - protein, 235 aa, Artificial Sequence
  source: /note="Description of Artificial Sequence: Synthetic polypeptide"
DIQMTQSPSTLSASVGDRVTITCKAQLSHKCDITLQEIIKTLNSLTEQKTLCTELTVTDIFAASKNTTEKETFCRAATVLRQFYSHHEKDTRCLGATAQQFHRHKQLIRFLKRLDRNLWGLAGLNSCPVKEANQSTLENFLERLKTIMREKYSKCSSVGYMHWYQQKPGKAPKLLIYDTSKLASGVPSRFSGSGSGTEFTLTISSLQPDDFATYYCFQGSGYPFTFGGGTKLEIK

SEQ ID NO: 64 - protein, 342 aa, Artificial Sequence
  source: /note="Description of Artificial Sequence: Synthetic polypeptide"
DIQMTQSPSTLSASVGDRVTITCKAQLSHKCDITLQEIIKTLNSLTEQKTLCTELTVTDIFAASKNTTEKETFCRAATVLRQFYSHHEKDTRCLGATAQQFHRHKQLIRFLKRLDRNLWGLAGLNSCPVKEANQSTLENFLERLKTIMREKYSKCSSVGYMHWYQQKPGKAPKLLIYDTSKLASGVPSRFSGSGSGTEFTLTISSLQPDDFATYYCFQGSGYPFTFGGGTKLEIKRTVAAPSVFIFPPSDEQLKSGTASVVCLLNNFYPREAKVQWKVDNALQSGNSQESVTEQDSKDSTYSLSSTLTLSKADYEKHKVYACEVTHQGLSSPVTKSFNRGEC

SEQ ID NO: 65 - protein, 7 aa, Artificial Sequence
  source: /note="Description of Artificial Sequence: Synthetic peptide"
TSGMSVG

SEQ ID NO: 66 - protein, 15 aa, Artificial Sequence
  source: /note="Description of Artificial Sequence: Synthetic peptide"
DIWWDDKKDYNPSLK

SEQ ID NO: 67 - protein, 10 aa, Artificial Sequence
  source: /note="Description of Artificial Sequence: Synthetic peptide"
SMITNWYFDV

SEQ ID NO: 68 - protein, 9 aa, Artificial Sequence
  source: /note="Description of Artificial Sequence: Synthetic peptide"
GFSLSTSGM

SEQ ID NO: 69 - protein, 5 aa, Artificial Sequence
  source: /note="Description of Artificial Sequence: Synthetic peptide"
WWDDK

SEQ ID NO: 70 - protein, 10 aa, Artificial Sequence
  source: /note="Description of Artificial Sequence: Synthetic peptide"
SMITNWYFDV

SEQ ID NO: 71 - protein, 120 aa, Artificial Sequence; identical to SEQ ID NO: 55
  source: /note="Description of Artificial Sequence: Synthetic polypeptide"

SEQ ID NO: 72 - protein, 450 aa, Artificial Sequence; identical to SEQ ID NO: 56
  source: /note="Description of Artificial Sequence: Synthetic polypeptide"

SEQ ID NO: 73 - protein, 10 aa, Artificial Sequence
  source: /note="Description of Artificial Sequence: Synthetic peptide"
KAQLSVGYMH

SEQ ID NO: 74 - protein, 136 aa, Artificial Sequence
  source: /note="Description of Artificial Sequence: Synthetic polypeptide"
DTHKCDITLQEIIKTLNSLTEQKTLCTELTVTDIFAASKNTTEKETFCRAATVLRQFYSHHEKDTRCLGATAQQFHRHKQLIRFLKRLDRNLWGLAGLNSCPVKEANQSTLENFLERLKTIMREKYSKCSSSKLAS

SEQ ID NO: 75 - protein, 9 aa, Artificial Sequence
  source: /note="Description of Artificial Sequence: Synthetic peptide"
FQGSGYPFT

SEQ ID NO: 76 - protein, 6 aa, Artificial Sequence
  source: /note="Description of Artificial Sequence: Synthetic peptide"
QLSVGY

SEQ ID NO: 77 - protein, 132 aa, Artificial Sequence
  source: /note="Description of Artificial Sequence: Synthetic polypeptide"
DTHKCDITLQEIIKTLNSLTEQKTLCTELTVTDIFAASKNTTEKETFCRAATVLRQFYSHHEKDTRCLGATAQQFHRHKQLIRFLKRLDRNLWGLAGLNSCPVKEANQSTLENFLERLKTIMREKYSKCSSS

SEQ ID NO: 78 - protein, 6 aa, Artificial Sequence
  source: /note="Description of Artificial Sequence: Synthetic peptide"
GSGYPF

SEQ ID NO: 79 - protein, 235 aa, Artificial Sequence
  source: /note="Description of Artificial Sequence: Synthetic polypeptide"
DIQMTQSPSTLSASVGDRVTITCKAQLSVGYMHWYQQKPGKAPKLLIYDTHKCDITLQEIIKTLNSLTEQKTLCTELTVTDIFAASKNTTEKETFCRAATVLRQFYSHHEKDTRCLGATAQQFHRHKQLIRFLKRLDRNLWGLAGLNSCPVKEANQSTLENFLERLKTIMREKYSKCSSSKLASGVPSRFSGSGSGTEFTLTISSLQPDDFATYYCFQGSGYPFTFGGGTKLEIK

SEQ ID NO: 80 - protein, 342 aa, Artificial Sequence
  source: /note="Description of Artificial Sequence: Synthetic polypeptide"
DIQMTQSPSTLSASVGDRVTITCKAQLSVGYMHWYQQKPGKAPKLLIYDTHKCDITLQEIIKTLNSLTEQKTLCTELTVTDIFAASKNTTEKETFCRAATVLRQFYSHHEKDTRCLGATAQQFHRHKQLIRFLKRLDRNLWGLAGLNSCPVKEANQSTLENFLERLKTIMREKYSKCSSSKLASGVPSRFSGSGSGTEFTLTISSLQPDDFATYYCFQGSGYPFTFGGGTKLEIKRTVAAPSVFIFPPSDEQLKSGTASVVCLLNNFYPREAKVQWKVDNALQSGNSQESVTEQDSKDSTYSLSSTLTLSKADYEKHKVYACEVTHQGLSSPVTKSFNRGEC

SEQ ID NO: 81 - protein, 7 aa, Artificial Sequence
  source: /note="Description of Artificial Sequence: Synthetic peptide"
TSGMSVG

SEQ ID NO: 82 - protein, 15 aa, Artificial Sequence
  source: /note="Description of Artificial Sequence: Synthetic peptide"
DIWWDDKKDYNPSLK

SEQ ID NO: 83 - protein, 10 aa, Artificial Sequence
  source: /note="Description of Artificial Sequence: Synthetic peptide"
SMITNWYFDV

SEQ ID NO: 84 - protein, 9 aa, Artificial Sequence
  source: /note="Description of Artificial Sequence: Synthetic peptide"
GFSLSTSGM

SEQ ID NO: 85 - protein, 5 aa, Artificial Sequence
  source: /note="Description of Artificial Sequence: Synthetic peptide"
WWDDK

SEQ ID NO: 86 - protein, 10 aa, Artificial Sequence
  source: /note="Description of Artificial Sequence: Synthetic peptide"
SMITNWYFDV

SEQ ID NO: 87 - protein, 120 aa, Artificial Sequence; identical to SEQ ID NO: 55
  source: /note="Description of Artificial Sequence: Synthetic polypeptide"

SEQ ID NO: 88 - protein, 450 aa, Artificial Sequence; identical to SEQ ID NO: 56
  source: /note="Description of Artificial Sequence: Synthetic polypeptide"

SEQ ID NO: 89 - protein, 10 aa, Artificial Sequence
  source: /note="Description of Artificial Sequence: Synthetic peptide"
KAQLSVGYMH

SEQ ID NO: 90 - protein, 7 aa, Artificial Sequence
  source: /note="Description of Artificial Sequence: Synthetic peptide"
DTSKLAS

SEQ ID NO: 91 - protein, 138 aa, Artificial Sequence
  source: /note="Description of Artificial Sequence: Synthetic polypeptide"
FQGSGHKCDITLQEIIKTLNSLTEQKTLCTELTVTDIFAASKNTTEKETFCRAATVLRQFYSHHEKDTRCLGATAQQFHRHKQLIRFLKRLDRNLWGLAGLNSCPVKEANQSTLENFLERLKTIMREKYSKCSSYPFT

SEQ ID NO: 92 - protein, 6 aa, Artificial Sequence
  source: /note="Description of Artificial Sequence: Synthetic peptide"
QLSVGY

SEQ ID NO: 93 - protein, 3 aa, Artificial Sequence
  source: /note="Description of Artificial Sequence: Synthetic peptide"
DTS

SEQ ID NO: 94 - protein, 135 aa, Artificial Sequence
  source: /note="Description of Artificial Sequence: Synthetic polypeptide"
GSGHKCDITLQEIIKTLNSLTEQKTLCTELTVTDIFAASKNTTEKETFCRAATVLRQFYSHHEKDTRCLGATAQQFHRHKQLIRFLKRLDRNLWGLAGLNSCPVKEANQSTLENFLERLKTIMREKYSKCSSYPF

SEQ ID NO: 95 - protein, 235 aa, Artificial Sequence
  source: /note="Description of Artificial Sequence: Synthetic polypeptide"
DIQMTQSPSTLSASVGDRVTITCKAQLSVGYMHWYQQKPGKAPKLLIYDTSKLASGVPSRFSGSGSGTEFTLTISSLQPDDFATYYCFQGSGHKCDITLQEIIKTLNSLTEQKTLCTELTVTDIFAASKNTTEKETFCRAATVLRQFYSHHEKDTRCLGATAQQFHRHKQLIRFLKRLDRNLWGLAGLNSCPVKEANQSTLENFLERLKTIMREKYSKCSSYPFTFGGGTKLEIK

SEQ ID NO: 96 - protein, 342 aa, Artificial Sequence
  source: /note="Description of Artificial Sequence: Synthetic polypeptide"
DIQMTQSPSTLSASVGDRVTITCKAQLSVGYMHWYQQKPGKAPKLLIYDTSKLASGVPSRFSGSGSGTEFTLTISSLQPDDFATYYCFQGSGHKCDITLQEIIKTLNSLTEQKTLCTELTVTDIFAASKNTTEKETFCRAATVLRQFYSHHEKDTRCLGATAQQFHRHKQLIRFLKRLDRNLWGLAGLNSCPVKEANQSTLENFLERLKTIMREKYSKCSSYPFTFGGGTKLEIKRTVAAPSVFIFPPSDEQLKSGTASVVCLLNNFYPREAKVQWKVDNALQSGNSQESVTEQDSKDSTYSLSSTLTLSKADYEKHKVYACEVTHQGLSSPVTKSFNRGEC

SEQ ID NO: 97 - protein, 159 aa, Artificial Sequence
  source: /note="Description of Artificial Sequence: Synthetic polypeptide"
CDIEGKDGKQYESVLMVSIDQLLDSMKEIGSNCLNNEFNFFKRHICDANKEGMFLFRAARKLRQFLKMNSTGDFDLHLLKVSEGTTILLNCTGQVKGRKPAALGEAQPTKSLEENKSLKEQKKLNDLCFLKRLLQEIKTCWNKILMGTKEHSTSGMSVG

SEQ ID NO: 98 - protein, 16 aa, Artificial Sequence
  source: /note="Description of Artificial Sequence: Synthetic peptide"
DIWWDDKKDYNPSLKS

SEQ ID NO: 99 - protein, 10 aa, Artificial Sequence
  source: /note="Description of Artificial Sequence: Synthetic peptide"
SMITNWYFDV

SEQ ID NO: 100 - protein, 161 aa, Artificial Sequence
  source: /note="Description of Artificial Sequence: Synthetic polypeptide"
GFSLDCDIEGKDGKQYESVLMVSIDQLLDSMKEIGSNCLNNEFNFFKRHICDANKEGMFLFRAARKLRQFLKMNSTGDFDLHLLKVSEGTTILLNCTGQVKGRKPAALGEAQPTKSLEENKSLKEQKKLNDLCFLKRLLQEIKTCWNKILMGTKEHSTSGM

SEQ ID NO: 101 - protein, 5 aa, Artificial Sequence
  source: /note="Description of Artificial Sequence: Synthetic peptide"
WWDDK

SEQ ID NO: 102 - protein, 10 aa, Artificial Sequence
  source: /note="Description of Artificial Sequence: Synthetic peptide"
SMITNWYFDV

SEQ ID NO: 103 - protein, 272 aa, Artificial Sequence
  source: /note="Description of Artificial Sequence: Synthetic polypeptide"
QVTLRESGPALVKPTQTLTLTCTFSGFSLDCDIEGKDGKQYESVLMVSIDQLLDSMKEIGSNCLNNEFNFFKRHICDANKEGMFLFRAARKLRQFLKMNSTGDFDLHLLKVSEGTTILLNCTGQVKGRKPAALGEAQPTKSLEENKSLKEQKKLNDLCFLKRLLQEIKTCWNKILMGTKEHSTSGMSVGWIRQPPGKALEWLADIWWDDKKDYNPSLKSRLTISKDTSKNQVVLKVTNMDPADTATYYCARSMITNWYFDVWGAGTTVTVSS

SEQ ID NO: 104 - protein, 602 aa, Artificial Sequence
  source: /note="Description of Artificial Sequence: Synthetic polypeptide"
QVTLRESGPALVKPTQTLTLTCTFSGFSLDCDIEGKDGKQYESVLMVSIDQLLDSMKEIGSNCLNNEFNFFKRHICDANKEGMFLFRAARKLRQFLKMNSTGDFDLHLLKVSEGTTILLNCTGQVKGRKPAALGEAQPTKSLEENKSLKEQKKLNDLCFLKRLLQEIKTCWNKILMGTKEHSTSGMSVGWIRQPPGKALEWLADIWWDDKKDYNPSLKSRLTISKDTSKNQVVLKVTNMDPADTATYYCARSMITNWYFDVWGAGTTVTVSSASTKGPSVFPLAPSSKSTSGGTAALGCLVKDYFPEPVTVSWNSGALTSGVHTFPAVLQSSGLYSLSSVVTVPSSSLGTQTYICNVNHKPSNTKVDKRVEPKSCDKTHTCPPCPAPELLGGPSVFLFPPKPKDTLMISRTPEVTCVVVAVSHEDPEVKFNWYVDGVEVHNAKTKPREEQYNSTYRVVSVLTVLHQDWLNGKEYKCKVSNKALAAPIEKTISKAKGQPREPQVYTLPPSREEMTKNQVSLTCLVKGFYPSDIAVEWESNGQPENNYKTTPPVLDSDGSFFLYSKLTVDKSRWQQGNVFSCSVMHEALHNHYTQKSLSLSPGK

SEQ ID NO: 105 - protein, 10 aa, Artificial Sequence
  source: /note="Description of Artificial Sequence: Synthetic peptide"
KAQLSVGYMH

SEQ ID NO: 106 - protein, 7 aa, Artificial Sequence
  source: /note="Description of Artificial Sequence: Synthetic peptide"
DTSKLAS

SEQ ID NO: 107 - protein, 9 aa, Artificial Sequence
  source: /note="Description of Artificial Sequence: Synthetic peptide"
FQGSGYPFT

SEQ ID NO: 108 - protein, 6 aa, Artificial Sequence
  source: /note="Description of Artificial Sequence: Synthetic peptide"
QLSVGY

SEQ ID NO: 109 - protein, 3 aa, Artificial Sequence
  source: /note="Description of Artificial Sequence: Synthetic peptide"
DTS

SEQ ID NO: 110 - protein, 6 aa, Artificial Sequence
  source: /note="Description of Artificial Sequence: Synthetic peptide"
GSGYPF

SEQ ID NO: 111 - protein, 106 aa, Artificial Sequence; identical to SEQ ID NO: 15
  source: /note="Description of Artificial Sequence: Synthetic polypeptide"

SEQ ID NO: 112 - protein, 213 aa, Artificial Sequence; identical to SEQ ID NO: 16
  source: /note="Description of Artificial Sequence: Synthetic polypeptide"

SEQ ID NO: 113 - protein, 7 aa, Artificial Sequence
  source: /note="Description of Artificial Sequence: Synthetic peptide"
TSGMSVG

SEQ ID NO: 114 - protein, 168 aa, Artificial Sequence
  source: /note="Description of Artificial Sequence: Synthetic polypeptide"
DIWWDDCDIEGKDGKQYESVLMVSIDQLLDSMKEIGSNCLNNEFNFFKRHICDANKEGMFLFRAARKLRQFLKMNSTGDFDLHLLKVSEGTTILLNCTGQVKGRKPAALGEAQPTKSLEENKSLKEQKKLNDLCFLKRLLQEIKTCWNKILMGTKEHDKKDYNPSLKS

SEQ ID NO: 115 - protein, 10 aa, Artificial Sequence
  source: /note="Description of Artificial Sequence: Synthetic peptide"
SMITNWYFDV

SEQ ID NO: 116 - protein, 9 aa, Artificial Sequence
  source: /note="Description of Artificial Sequence: Synthetic peptide"
GFSLSTSGM

SEQ ID NO: 117 - protein, 157 aa, Artificial Sequence
  source: /note="Description of Artificial Sequence: Synthetic polypeptide"
WWDDCDIEGKDGKQYESVLMVSIDQLLDSMKEIGSNCLNNEFNFFKRHICDANKEGMFLFRAARKLRQFLKMNSTGDFDLHLLKVSEGTTILLNCTGQVKGRKPAALGEAQPTKSLEENKSLKEQKKLNDLCFLKRLLQEIKTCWNKILMGTKEHDK

SEQ ID NO: 118 - protein, 10 aa, Artificial Sequence
  source: /note="Description of Artificial Sequence: Synthetic peptide"
SMITNWYFDV

SEQ ID NO: 119 - protein, 272 aa, Artificial Sequence
  source: /note="Description of Artificial Sequence: Synthetic polypeptide"
QVTLRESGPALVKPTQTLTLTCTFSGFSLSTSGMSVGWIRQPPGKALEWLADIWWDDCDIEGKDGKQYESVLMVSIDQLLDSMKEIGSNCLNNEFNFFKRHICDANKEGMFLFRAARKLRQFLKMNSTGDFDLHLLKVSEGTTILLNCTGQVKGRKPAALGEAQPTKSLEENKSLKEQKKLNDLCFLKRLLQEIKTCWNKILMGTKEHDKKDYNPSLKSRLTISKDTSKNQVVLKVTNMDPADTATYYCARSMITNWYFDVWGAGTTVTVSS

SEQ ID NO: 120 - protein, 602 aa, Artificial Sequence
  source: /note="Description of Artificial Sequence: Synthetic polypeptide"
QVTLRESGPALVKPTQTLTLTCTFSGFSLSTSGMSVGWIRQPPGKALEWLADIWWDDCDIEGKDGKQYESVLMVSIDQLLDSMKEIGSNCLNNEFNFFKRHICDANKEGMFLFRAARKLRQFLKMNSTGDFDLHLLKVSEGTTILLNCTGQVKGRKPAALGEAQPTKSLEENKSLKEQKKLNDLCFLKRLLQEIKTCWNKILMGTKEHDKKDYNPSLKSRLTISKDTSKNQVVLKVTNMDPADTATYYCARSMITNWYFDVWGAGTTVTVSSASTKGPSVFPLAPSSKSTSGGTAALGCLVKDYFPEPVTVSWNSGALTSGVHTFPAVLQSSGLYSLSSVVTVPSSSLGTQTYICNVNHKPSNTKVDKRVEPKSCDKTHTCPPCPAPELLGGPSVFLFPPKPKDTLMISRTPEVTCVVVAVSHEDPEVKFNWYVDGVEVHNAKTKPREEQYNSTYRVVSVLTVLHQDWLNGKEYKCKVSNKALAAPIEKTISKAKGQPREPQVYTLPPSREEMTKNQVSLTCLVKGFYPSDIAVEWESNGQPENNYKTTPPVLDSDGSFFLYSKLTVDKSRWQQGNVFSCSVMHEALHNHYTQKSLSLSPGK

SEQ ID NO: 121 - protein, 10 aa, Artificial Sequence
  source: /note="Description of Artificial Sequence: Synthetic peptide"
KAQLSVGYMH

SEQ ID NO: 122 - protein, 7 aa, Artificial Sequence
  source: /note="Description of Artificial Sequence: Synthetic peptide"
DTSKLAS

SEQ ID NO: 123 - protein, 9 aa, Artificial Sequence
  source: /note="Description of Artificial Sequence: Synthetic peptide"
FQGSGYPFT

SEQ ID NO: 124 - protein, 6 aa, Artificial Sequence
  source: /note="Description of Artificial Sequence: Synthetic peptide"
QLSVGY

SEQ ID NO: 125 - protein, 3 aa, Artificial Sequence
  source: /note="Description of Artificial Sequence: Synthetic peptide"
DTS

SEQ ID NO: 126 - protein, 6 aa, Artificial Sequence
  source: /note="Description of Artificial Sequence: Synthetic peptide"
GSGYPF

SEQ ID NO: 127 - protein, 106 aa, Artificial Sequence; identical to SEQ ID NO: 15
  source: /note="Description of Artificial Sequence: Synthetic polypeptide"

SEQ ID NO: 128 - protein, 213 aa, Artificial Sequence; identical to SEQ ID NO: 16
  source: /note="Description of Artificial Sequence: Synthetic polypeptide"

SEQ ID NO: 129 - protein, 7 aa, Artificial Sequence
  source: /note="Description of Artificial Sequence: Synthetic peptide"
TSGMSVG

SEQ ID NO: 130 - protein, 16 aa, Artificial Sequence
  source: /note="Description of Artificial Sequence: Synthetic peptide"
DIWWDDKKDYNPSLKS

SEQ ID NO: 131 - protein, 162 aa, Artificial Sequence
  source: /note="Description of Artificial Sequence: Synthetic polypeptide"
SMITDCDIEGKDGKQYESVLMVSIDQLLDSMKEIGSNCLNNEFNFFKRHICDANKEGMFLFRAARKLRQFLKMNSTGDFDLHLLKVSEGTTILLNCTGQVKGRKPAALGEAQPTKSLEENKSLKEQKKLNDLCFLKRLLQEIKTCWNKILMGTKEHNWYFDV

SEQ ID NO: 132 - protein, 9 aa, Artificial Sequence
  source: /note="Description of Artificial Sequence: Synthetic peptide"
GFSLSTSGM

SEQ ID NO: 133 - protein, 5 aa, Artificial Sequence
  source: /note="Description of Artificial Sequence: Synthetic peptide"
WWDDK

SEQ ID NO: 134 - protein, 162 aa, Artificial Sequence; identical to SEQ ID NO: 131
  source: /note="Description of Artificial Sequence: Synthetic polypeptide"

SEQ ID NO: 135 - protein, 272 aa, Artificial Sequence
  source: /note="Description of Artificial Sequence: Synthetic polypeptide"
QVTLRESGPALVKPTQTLTLTCTFSGFSLSTSGMSVGWIRQPPGKALEWLADIWWDDKKDYNPSLKSRLTISKDTSKNQVVLKVTNMDPADTATYYCARSMITDCDIEGKDGKQYESVLMVSIDQLLDSMKEIGSNCLNNEFNFFKRHICDANKEGMFLFRAARKLRQFLKMNSTGDFDLHLLKVSEGTTILLNCTGQVKGRKPAALGEAQPTKSLEENKSLKEQKKLNDLCFLKRLLQEIKTCWNKILMGTKEHNWYFDVWGAGTTVTVSS

SEQ ID NO: 136 - protein, 602 aa, Artificial Sequence
  source: /note="Description of Artificial Sequence: Synthetic polypeptide"
QVTLRESGPALVKPTQTLTLTCTFSGFSLSTSGMSVGWIRQPPGKALEWLADIWWDDKKDYNPSLKSRLTISKDTSKNQVVLKVTNMDPADTATYYCARSMITDCDIEGKDGKQYESVLMVSIDQLLDSMKEIGSNCLNNEFNFFKRHICDANKEGMFLFRAARKLRQFLKMNSTGDFDLHLLKVSEGTTILLNCTGQVKGRKPAALGEAQPTKSLEENKSLKEQKKLNDLCFLKRLLQEIKTCWNKILMGTKEHNWYFDVWGAGTTVTVSSASTKGPSVFPLAPSSKSTSGGTAALGCLVKDYFPEPVTVSWNSGALTSGVHTFPAVLQSSGLYSLSSVVTVPSSSLGTQTYICNVNHKPSNTKVDKRVEPKSCDKTHTCPPCPAPELLGGPSVFLFPPKPKDTLMISRTPEVTCVVVAVSHEDPEVKFNWYVDGVEVHNAKTKPREEQYNSTYRVVSVLTVLHQDWLNGKEYKCKVSNKALAAPIEKTISKAKGQPREPQVYTLPPSREEMTKNQVSLTCLVKGFYPSDIAVEWESNGQPENNYKTTPPVLDSDGSFFLYSKLTVDKSRWQQGNVFSCSVMHEALHNHYTQKSLSLSPGK

SEQ ID NO: 137 - protein, 10 aa, Artificial Sequence
  source: /note="Description of Artificial Sequence: Synthetic peptide"
KAQLSVGYMH

SEQ ID NO: 138 - protein, 7 aa, Artificial Sequence
  source: /note="Description of Artificial Sequence: Synthetic peptide"
DTSKLAS

SEQ ID NO: 139 - protein, 9 aa, Artificial Sequence
  source: /note="Description of Artificial Sequence: Synthetic peptide"
FQGSGYPFT

SEQ ID NO: 140 - protein, 6 aa, Artificial Sequence
  source: /note="Description of Artificial Sequence: Synthetic peptide"
QLSVGY

SEQ ID NO: 141 - protein, 3 aa, Artificial Sequence
  source: /note="Description of Artificial Sequence: Synthetic peptide"
DTS

SEQ ID NO: 142 - protein, 6 aa, Artificial Sequence
  source: /note="Description of Artificial Sequence: Synthetic peptide"
GSGYPF

SEQ ID NO: 143 - protein, 106 aa, Artificial Sequence; identical to SEQ ID NO: 15
  source: /note="Description of Artificial Sequence: Synthetic polypeptide"

SEQ ID NO: 144 - protein, 213 aa, Artificial Sequence; identical to SEQ ID NO: 16
  source: /note="Description of Artificial Sequence: Synthetic polypeptide"

SEQ ID NO: 145 - protein, 7 aa, Artificial Sequence
  source: /note="Description of Artificial Sequence: Synthetic peptide"
TSGMSVG

SEQ ID NO: 146 - protein, 15 aa, Artificial Sequence
  source: /note="Description of Artificial Sequence: Synthetic peptide"
DIWWDDKKDYNPSLK

SEQ ID NO: 147 - protein, 10 aa, Artificial Sequence
  source: /note="Description of Artificial Sequence: Synthetic peptide"
SMITNWYFDV

SEQ ID NO: 148 - protein, 9 aa, Artificial Sequence
  source: /note="Description of Artificial Sequence: Synthetic peptide"
GFSLSTSGM

SEQ ID NO: 149 - protein, 5 aa, Artificial Sequence
  source: /note="Description of Artificial Sequence: Synthetic peptide"
WWDDK

SEQ ID NO: 150 - protein, 10 aa, Artificial Sequence
  source: /note="Description of Artificial Sequence: Synthetic peptide"
SMITNWYFDV

SEQ ID NO: 151 - protein, 120 aa, Artificial Sequence; identical to SEQ ID NO: 55
  source: /note="Description of Artificial Sequence: Synthetic polypeptide"

SEQ ID NO: 152 - protein, 450 aa, Artificial Sequence; identical to SEQ ID NO: 56
  source: /note="Description of Artificial Sequence: Synthetic polypeptide"

SEQ ID NO: 153 - protein, 162 aa, Artificial Sequence
  source: /note="Description of Artificial Sequence: Synthetic polypeptide"
KAQLSDCDIEGKDGKQYESVLMVSIDQLLDSMKEIGSNCLNNEFNFFKRHICDANKEGMFLFRAARKLRQFLKMNSTGDFDLHLLKVSEGTTILLNCTGQVKGRKPAALGEAQPTKSLEENKSLKEQKKLNDLCFLKRLLQEIKTCWNKILMGTKEHVGYMH

SEQ ID NO: 154 - protein, 7 aa, Artificial Sequence
  source: /note="Description of Artificial Sequence: Synthetic peptide"
DTSKLAS

SEQ ID NO: 155 - protein, 9 aa, Artificial Sequence
  source: /note="Description of Artificial Sequence: Synthetic peptide"
FQGSGYPFT

SEQ ID NO: 156 - protein, 158 aa, Artificial Sequence
  source: /note="Description of Artificial Sequence: Synthetic polypeptide"
QLSDCDIEGKDGKQYESVLMVSIDQLLDSMKEIGSNCLNNEFNFFKRHICDANKEGMFLFRAARKLRQFLKMNSTGDFDLHLLKVSEGTTILLNCTGQVKGRKPAALGEAQPTKSLEENKSLKEQKKLNDLCFLKRLLQEIKTCWNKILMGTKEHVGY

SEQ ID NO: 157 - protein, 3 aa, Artificial Sequence
  source: /note="Description of Artificial Sequence: Synthetic peptide"
DTS

SEQ ID NO: 158 - protein, 6 aa, Artificial Sequence
  source: /note="Description of Artificial Sequence: Synthetic peptide"
GSGYPF

SEQ ID NO: 159 - protein, 258 aa, Artificial Sequence
  source: /note="Description of Artificial Sequence: Synthetic polypeptide"
DIQMTQSPSTLSASVGDRVTITCKAQLSDCDIEGKDGKQYESVLMVSIDQLLDSMKEIGSNCLNNEFNFFKRHICDANKEGMFLFRAARKLRQFLKMNSTGDFDLHLLKVSEGTTILLNCTGQVKGRKPAALGEAQPTKSLEENKSLKEQKKLNDLCFLKRLLQEIKTCWNKILMGTKEHVGYMHWYQQKPGKAPKLLIYDTSKLASGVPSRFSGSGSGTEFTLTISSLQPDDFATYYCFQGSGYPFTFGGGTKLEIK

SEQ ID NO: 160 - protein, 365 aa, Artificial Sequence
  source: /note="Description of Artificial Sequence: Synthetic polypeptide"
DIQMTQSPSTLSASVGDRVTITCKAQLSDCDIEGKDGKQYESVLMVSIDQLLDSMKEIGSNCLNNEFNFFKRHICDANKEGMFLFRAARKLRQFLKMNSTGDFDLHLLKVSEGTTILLNCTGQVKGRKPAALGEAQPTKSLEENKSLKEQKKLNDLCFLKRLLQEIKTCWNKILMGTKEHVGYMHWYQQKPGKAPKLLIYDTSKLASGVPSRFSGSGSGTEFTLTISSLQPDDFATYYCFQGSGYPFTFGGGTKLEIKRTVAAPSVFIFPPSDEQLKSGTASVVCLLNNFYPREAKVQWKVDNALQSGNSQESVTEQDSKDSTYSLSSTLTLSKADYEKHKVYACEVTHQGLSSPVTKSFNRGEC

SEQ ID NO: 161 - protein, 7 aa, Artificial Sequence
  source: /note="Description of Artificial Sequence: Synthetic peptide"
TSGMSVG

SEQ ID NO: 162 - protein, 15 aa, Artificial Sequence
  source: /note="Description of Artificial Sequence: Synthetic peptide"
DIWWDDKKDYNPSLK

SEQ ID NO: 163 - protein, 10 aa, Artificial Sequence
  source: /note="Description of Artificial Sequence: Synthetic peptide"
SMITNWYFDV

SEQ ID NO: 164 - protein, 9 aa, Artificial Sequence
  source: /note="Description of Artificial Sequence: Synthetic peptide"
GFSLSTSGM

SEQ ID NO: 165 - protein, 5 aa, Artificial Sequence
  source: /note="Description of Artificial Sequence: Synthetic peptide"
WWDDK

SEQ ID NO: 166 - protein, 10 aa, Artificial Sequence
  source: /note="Description of Artificial Sequence: Synthetic peptide"
SMITNWYFDV

SEQ ID NO: 167 - protein, 120 aa, Artificial Sequence; identical to SEQ ID NO: 55
  source: /note="Description of Artificial Sequence: Synthetic polypeptide"

SEQ ID NO: 168 - protein, 450 aa, Artificial Sequence; identical to SEQ ID NO: 56
  source: /note="Description of Artificial Sequence: Synthetic polypeptide"

SEQ ID NO: 169 - protein, 10 aa, Artificial Sequence
  source: /note="Description of Artificial Sequence: Synthetic peptide"
KAQLSVGYMH

SEQ ID NO: 170 - protein, 159 aa, Artificial Sequence
  source: /note="Description of Artificial Sequence: Synthetic polypeptide"
DTDCDIEGKDGKQYESVLMVSIDQLLDSMKEIGSNCLNNEFNFFKRHICDANKEGMFLFRAARKLRQFLKMNSTGDFDLHLLKVSEGTTILLNCTGQVKGRKPAALGEAQPTKSLEENKSLKEQKKLNDLCFLKRLLQEIKTCWNKILMGTKEHSKLAS

SEQ ID NO: 171 - protein, 9 aa, Artificial Sequence
  source: /note="Description of Artificial Sequence: Synthetic peptide"
FQGSGYPFT

SEQ ID NO: 172 - protein, 6 aa, Artificial Sequence
  source: /note="Description of Artificial Sequence: Synthetic peptide"
QLSVGY

SEQ ID NO: 173 - protein, 155 aa, Artificial Sequence
  source: /note="Description of Artificial Sequence: Synthetic polypeptide"
DTDCDIEGKDGKQYESVLMVSIDQLLDSMKEIGSNCLNNEFNFFKRHICDANKEGMFLFRAARKLRQFLKMNSTGDFDLHLLKVSEGTTILLNCTGQVKGRKPAALGEAQPTKSLEENKSLKEQKKLNDLCFLKRLLQEIKTCWNKILMGTKEHS

SEQ ID NO: 174 - protein, 6 aa, Artificial Sequence
  source: /note="Description of Artificial Sequence: Synthetic peptide"
GSGYPF

SEQ ID NO: 175 - protein, 258 aa, Artificial Sequence
  source: /note="Description of Artificial Sequence: Synthetic polypeptide"
DIQMTQSPSTLSASVGDRVTITCKAQLSVGYMHWYQQKPGKAPKLLIYDTDCDIEGKDGKQYESVLMVSIDQLLDSMKEIGSNCLNNEFNFFKRHICDANKEGMFLFRAARKLRQFLKMNSTGDFDLHLLKVSEGTTILLNCTGQVKGRKPAALGEAQPTKSLEENKSLKEQKKLNDLCFLKRLLQEIKTCWNKILMGTKEHSKLASGVPSRFSGSGSGTEFTLTISSLQPDDFATYYCFQGSGYPFTFGGGTKLEIK

SEQ ID NO: 176 - protein, 365 aa, Artificial Sequence
  source: /note="Description of Artificial Sequence: Synthetic polypeptide"
DIQMTQSPSTLSASVGDRVTITCKAQLSVGYMHWYQQKPGKAPKLLIYDTDCDIEGKDGKQYESVLMVSIDQLLDSMKEIGSNCLNNEFNFFKRHICDANKEGMFLFRAARKLRQFLKMNSTGDFDLHLLKVSEGTTILLNCTGQVKGRKPAALGEAQPTKSLEENKSLKEQKKLNDLCFLKRLLQEIKTCWNKILMGTKEHSKLASGVPSRFSGSGSGTEFTLTISSLQPDDFATYYCFQGSGYPFTFGGGTKLEIKRTVAAPSVFIFPPSDEQLKSGTASVVCLLNNFYPREAKVQWKVDNALQSGNSQESVTEQDSKDSTYSLSSTLTLSKADYEKHKVYACEVTHQGLSSPVTKSFNRGEC

SEQ ID NO: 177 - protein, 7 aa, Artificial Sequence
  source: /note="Description of Artificial Sequence: Synthetic peptide"
TSGMSVG

SEQ ID NO: 178 - protein, 15 aa, Artificial Sequence
  source: /note="Description of Artificial Sequence: Synthetic peptide"
DIWWDDKKDYNPSLK

SEQ ID NO: 179 - protein, 10 aa, Artificial Sequence
  source: /note="Description of Artificial Sequence: Synthetic peptide"
SMITNWYFDV

SEQ ID NO: 180 - protein, 9 aa, Artificial Sequence
  source: /note="Description of Artificial Sequence: Synthetic peptide"
GFSLSTSGM

SEQ ID NO: 181 - protein, 5 aa, Artificial Sequence
  source: /note="Description of Artificial Sequence: Synthetic peptide"
WWDDK

SEQ ID NO: 182 - protein, 10 aa, Artificial Sequence
  source: /note="Description of Artificial Sequence: Synthetic peptide"
SMITNWYFDV

SEQ ID NO: 183 - protein, 120 aa, Artificial Sequence; identical to SEQ ID NO: 55
  source: /note="Description of Artificial Sequence: Synthetic polypeptide"

SEQ ID NO: 184 - protein, 450 aa, Artificial Sequence; identical to SEQ ID NO: 56
  source: /note="Description of Artificial Sequence: Synthetic polypeptide"

SEQ ID NO: 185 - protein, 10 aa, Artificial Sequence
  source: /note="Description of Artificial Sequence: Synthetic peptide"
KAQLSVGYMH

SEQ ID NO: 186 - protein, 7 aa, Artificial Sequence
  source: /note="Description of Artificial Sequence: Synthetic peptide"
DTSKLAS

SEQ ID NO: 187 - protein, 161 aa, Artificial Sequence
  source: /note="Description of Artificial Sequence: Synthetic polypeptide"
FQGSGDCDIEGKDGKQYESVLMVSIDQLLDSMKEIGSNCLNNEFNFFKRHICDANKEGMFLFRAARKLRQFLKMNSTGDFDLHLLKVSEGTTILLNCTGQVKGRKPAALGEAQPTKSLEENKSLKEQKKLNDLCFLKRLLQEIKTCWNKILMGTKEHYPFT

SEQ ID NO: 188 - protein, 6 aa, Artificial Sequence
  source: /note="Description of Artificial Sequence: Synthetic peptide"
QLSVGY

SEQ ID NO: 189 - protein, 3 aa, Artificial Sequence
  source: /note="Description of Artificial Sequence: Synthetic peptide"
DTS

SEQ ID NO: 190 - protein, 158 aa, Artificial Sequence
  source: /note="Description of Artificial Sequence: Synthetic polypeptide"
GSGDCDIEGKDGKQYESVLMVSIDQLLDSMKEIGSNCLNNEFNFFKRHICDANKEGMFLFRAARKLRQFLKMNSTGDFDLHLLKVSEGTTILLNCTGQVKGRKPAALGEAQPTKSLEENKSLKEQKKLNDLCFLKRLLQEIKTCWNKILMGTKEHYPF

SEQ ID NO: 191 - protein, 258 aa, Artificial Sequence
  source: /note="Description of Artificial Sequence: Synthetic polypeptide"
DIQMTQSPSTLSASVGDRVTITCKAQLSVGYMHWYQQKPGKAPKLLIYDTSKLASGVPSRFSGSGSGTEFTLTISSLQPDDFATYYCFQGSGDCDIEGKDGKQYESVLMVSIDQLLDSMKEIGSNCLNNEFNFFKRHICDANKEGMFLFRAARKLRQFLKMNSTGDFDLHLLKVSEGTTILLNCTGQVKGRKPAALGEAQPTKSLEENKSLKEQKKLNDLCFLKRLLQEIKTCWNKILMGTKEHYPFTFGGGTKLEIK

SEQ ID NO: 192 - protein, 365 aa, Artificial Sequence
  source: /note="Description of Artificial Sequence: Synthetic polypeptide"
DIQMTQSPSTLSASVGDRVTITCKAQLSVGYMHWYQQKPGKAPKLLIYDTSKLASGVPSRFSGSGSGTEFTLTISSLQPDDFATYYCFQGSGDCDIEGKDGKQYESVLMVSIDQLLDSMKEIGSNCLNNEFNFFKRHICDANKEGMFLFRAARKLRQFLKMNSTGDFDLHLLKVSEGTTILLNCTGQVKGRKPAALGEAQPTKSLEENKSLKEQKKLNDLCFLKRLLQEIKTCWNKILMGTKEHYPFTFGGGTKLEIKRTVAAPSVFIFPPSDEQLKSGTASVVCLLNNFYPREAKVQWKVDNALQSGNSQESVTEQDSKDSTYSLSSTLTLSKADYEKHKVYACEVTHQGLSSPVTKSFNRGEC

SEQ ID NO: 193 - protein, 192 aa, Artificial Sequence
  source: /note="Description of Artificial Sequence: Synthetic polypeptide"
PVPPGEDSKDVAAPHRQPLTSSERIDKQIRYILDGISALRKETCNKSNMCESSKEALAENNLNLPKMAEKDGCFQSGFNEETCLVKIITGLLEFEVYLEYLQNRFESSEEQARAVQMSTKVLIQFLQKKAKNLDAITTPDPTTNASLLTKLQAQNQWLQDMTTHLILRSFKEFLQSSLRALRQMSTSGMSVG

SEQ ID NO: 194 - protein, 16 aa, Artificial Sequence
  source: /note="Description of Artificial Sequence: Synthetic peptide"
DIWWDDKKDYNPSLKS

SEQ ID NO: 195 - protein, 10 aa, Artificial Sequence
  source: /note="Description of Artificial Sequence: Synthetic peptide"
SMITNWYFDV

SEQ ID NO: 196 - protein, 194 aa, Artificial Sequence
  source: /note="Description of Artificial Sequence: Synthetic polypeptide"
GFSLAPVPPGEDSKDVAAPHRQPLTSSERIDKQIRYILDGISALRKETCNKSNMCESSKEALAENNLNLPKMAEKDGCFQSGFNEETCLVKIITGLLEFEVYLEYLQNRFESSEEQARAVQMSTKVLIQFLQKKAKNLDAITTPDPTTNASLLTKLQAQNQWLQDMTTHLILRSFKEFLQSSLRALRQMSTSGM

SEQ ID NO: 197 - protein, 5 aa, Artificial Sequence
  source: /note="Description of Artificial Sequence: Synthetic peptide"
WWDDK

SEQ ID NO: 198 - protein, 10 aa, Artificial Sequence
  source: /note="Description of Artificial Sequence: Synthetic peptide"
SMITNWYFDV

SEQ ID NO: 199 - protein, 305 aa, Artificial Sequence
  source: /note="Description of Artificial Sequence: Synthetic polypeptide"
QVTLRESGPALVKPTQTLTLTCTFSGFSLAPVPPGEDSKDVAAPHRQPLTSSERIDKQIRYILDGISALRKETCNKSNMCESSKEALAENNLNLPKMAEKDGCFQSGFNEETCLVKIITGLLEFEVYLEYLQNRFESSEEQARAVQMSTKVLIQFLQKKAKNLDAITTPDPTTNASLLTKLQAQNQWLQDMTTHLILRSFKEFLQSSLRALRQMSTSGMSVGWIRQPPGKALEWLADIWWDDKKDYNPSLKSRLTISKDTSKNQVVLKVTNMDPADTATYYCARSMITNWYFDVWGAGTTVTVSS

SEQ ID NO: 200 - protein, 635 aa, Artificial Sequence
  source: /note="Description of Artificial Sequence: Synthetic polypeptide"
QVTLRESGPALVKPTQTLTLTCTFSGFSLAPVPPGEDSKDVAAPHRQPLTSSERIDKQIRYILDGISALRKETCNKSNMCESSKEALAENNLNLPKMAEKDGCFQSGFNEETCLVKIITGLLEFEVYLEYLQNRFESSEEQARAVQMSTKVLIQFLQKKAKNLDAITTPDPTTNASLLTKLQAQNQWLQDMTTHLILRSFKEFLQSSLRALRQMSTSGMSVGWIRQPPGKALEWLADIWWDDKKDYNPSLKSRLTISKDTSKNQVVLKVTNMDPADTATYYCARSMITNWYFDVWGAGTTVTVSSASTKGPSVFPLAPSSKSTSGGTAALGCLVKDYFPEPVTVSWNSGALTSGVHTFPAVLQSSGLYSLSSVVTVPSSSLGTQTYICNVNHKPSNTKVDKRVEPKSCDKTHTCPPCPAPELLGGPSVFLFPPKPKDTLMISRTPEVTCVVVAVSHEDPEVKFNWYVDGVEVHNAKTKPREEQYNSTYRVVSVLTVLHQDWLNGKEYKCKVSNKALAAPIEKTISKAKGQPREPQVYTLPPSREEMTKNQVSLTCLVKGFYPSDIAVEWESNGQPENNYKTTPPVLDSDGSFFLYSKLTVDKSRWQQGNVFSCSVMHEALHNHYTQKSLSLSPGK

SEQ ID NO: 201 - protein, 10 aa, Artificial Sequence
  source: /note="Description of Artificial Sequence: Synthetic peptide"
KAQLSVGYMH

SEQ ID NO: 202 - protein, 7 aa, Artificial Sequence
  source: /note="Description of Artificial Sequence: Synthetic peptide"
DTSKLAS

SEQ ID NO: 203 - protein, 9 aa, Artificial Sequence
  source: /note="Description of Artificial Sequence: Synthetic peptide"
FQGSGYPFT

SEQ ID NO: 204 - protein, 6 aa, Artificial Sequence
  source: /note="Description of Artificial Sequence: Synthetic peptide"
QLSVGY

SEQ ID NO: 205 - protein, 3 aa, Artificial Sequence
  source: /note="Description of Artificial Sequence: Synthetic peptide"
DTS

SEQ ID NO: 206 - protein, 6 aa, Artificial Sequence
  source: /note="Description of Artificial Sequence: Synthetic peptide"
GSGYPF

SEQ ID NO: 207 - protein, 106 aa, Artificial Sequence; identical to SEQ ID NO: 15
  source: /note="Description of Artificial Sequence: Synthetic polypeptide"

SEQ ID NO: 208 - protein, 213 aa, Artificial Sequence; identical to SEQ ID NO: 16
  source: /note="Description of Artificial Sequence: Synthetic polypeptide"

SEQ ID NO: 209 - protein, 7 aa, Artificial Sequence
  source: /note="Description of Artificial Sequence: Synthetic peptide"
TSGMSVG

SEQ ID NO: 210 - protein, 201 aa, Artificial Sequence
  source: /note="Description of Artificial Sequence: Synthetic polypeptide"
DIWWDAPVPPGEDSKDVAAPHRQPLTSSERIDKQIRYILDGISALRKETCNKSNMCESSKEALAENNLNLPKMAEKDGCFQSGFNEETCLVKIITGLLEFEVYLEYLQNRFESSEEQARAVQMSTKVLIQFLQKKAKNLDAITTPDPTTNASLLTKLQAQNQWLQDMTTHLILRSFKEFLQSSLRALRQMDKKDYNPSLKS

SEQ ID NO: 211 - protein, 10 aa, Artificial Sequence
  source: /note="Description of Artificial Sequence: Synthetic peptide"
SMITNWYFDV

SEQ ID NO: 212 - protein, 9 aa, Artificial Sequence
  source: /note="Description of Artificial Sequence: Synthetic peptide"
GFSLSTSGM

SEQ ID NO: 213 - protein, 190 aa, Artificial Sequence
  source: /note="Description of Artificial Sequence: Synthetic polypeptide"
WWDAPVPPGEDSKDVAAPHRQPLTSSERIDKQIRYILDGISALRKETCNKSNMCESSKEALAENNLNLPKMAEKDGCFQSGFNEETCLVKIITGLLEFEVYLEYLQNRFESSEEQARAVQMSTKVLIQFLQKKAKNLDAITTPDPTTNASLLTKLQAQNQWLQDMTTHLILRSFKEFLQSSLRALRQMDK

SEQ ID NO: 214 - protein, 10 aa, Artificial Sequence
  source: /note="Description of Artificial Sequence: Synthetic peptide"
SMITNWYFDV

SEQ ID NO: 215 - protein, 305 aa, Artificial Sequence
  source: /note="Description of Artificial Sequence: Synthetic polypeptide"
QVTLRESGPALVKPTQTLTLTCTFSGFSLSTSGMSVGWIRQPPGKALEWLADIWWDAPVPPGEDSKDVAAPHRQPLTSSERIDKQIRYILDGISALRKETCNKSNMCESSKEALAENNLNLPKMAEKDGCFQSGFNEETCLVKIITGLLEFEVYLEYLQNRFESSEEQARAVQMSTKVLIQFLQKKAKNLDAITTPDPTTNASLLTKLQAQNQWLQDMTTHLILRSFKEFLQSSLRALRQMDKKDYNPSLKSRLTISKDTSKNQVVLKVTNMDPADTATYYCARSMITNWYFDVWGAGTTVTVSS

SEQ ID NO: 216 - protein, 635 aa, Artificial Sequence
  source: /note="Description of Artificial Sequence: Synthetic polypeptide"
QVTLRESGPALVKPTQTLTLTCTFSGFSLSTSGMSVGWIRQPPGKALEWLADIWWDAPVPPGEDSKDVAAPHRQPLTSSERIDKQIRYILDGISALRKETCNKSNMCESSKEALAENNLNLPKMAEKDGCFQSGFNEETCLVKIITGLLEFEVYLEYLQNRFESSEEQARAVQMSTKVLIQFLQKKAKNLDAITTPDPTTNASLLTKLQAQNQWLQDMTTHLILRSFKEFLQSSLRALRQMDKKDYNPSLKSRLTISKDTSKNQVVLKVTNMDPADTATYYCARSMITNWYFDVWGAGTTVTVSSASTKGPSVFPLAPSSKSTSGGTAALGCLVKDYFPEPVTVSWNSGALTSGVHTFPAVLQSSGLYSLSSVVTVPSSSLGTQTYICNVNHKPSNTKVDKRVEPKSCDKTHTCPPCPAPELLGGPSVFLFPPKPKDTLMISRTPEVTCVVVAVSHEDPEVKFNWYVDGVEVHNAKTKPREEQYNSTYRVVSVLTVLHQDWLNGKEYKCKVSNKALAAPIEKTISKAKGQPREPQVYTLPPSREEMTKNQVSLTCLVKGFYPSDIAVEWESNGQPENNYKTTPPVLDSDGSFFLYSKLTVDKSRWQQGNVFSCSVMHEALHNHYTQKSLSLSPGK

SEQ ID NO: 217 - protein, 10 aa, Artificial Sequence
  source: /note="Description of Artificial Sequence: Synthetic peptide"
KAQLSVGYMH

SEQ ID NO: 218 - protein, 7 aa, Artificial Sequence
  source: /note="Description of Artificial Sequence: Synthetic peptide"
DTSKLAS

SEQ ID NO: 219 - protein, 9 aa, Artificial Sequence
  source: /note="Description of Artificial Sequence: Synthetic peptide"
FQGSGYPFT

SEQ ID NO: 220 - protein, 6 aa, Artificial Sequence
  source: /note="Description of Artificial Sequence: Synthetic peptide"
QLSVGY

SEQ ID NO: 221 - protein, 3 aa, Artificial Sequence
  source: /note="Description of Artificial Sequence: Synthetic peptide"
DTS

SEQ ID NO: 222 - protein, 6 aa, Artificial Sequence
  source: /note="Description of Artificial Sequence: Synthetic peptide"
GSGYPF

SEQ ID NO: 223 - protein, 106 aa, Artificial Sequence; identical to SEQ ID NO: 15
  source: /note="Description of Artificial Sequence: Synthetic polypeptide"

SEQ ID NO: 224 - protein, 213 aa, Artificial Sequence; identical to SEQ ID NO: 16
  source: /note="Description of Artificial Sequence: Synthetic polypeptide"

SEQ ID NO: 225 - protein, 7 aa, Artificial Sequence
  source: /note="Description of Artificial Sequence: Synthetic peptide"
TSGMSVG

SEQ ID NO: 226 - protein, 16 aa, Artificial Sequence
  source: /note="Description of Artificial Sequence: Synthetic peptide"
DIWWDDKKDYNPSLKS

SEQ ID NO: 227 - protein, 195 aa, Artificial Sequence
  source: /note="Description of Artificial Sequence: Synthetic polypeptide"
SMITAPVPPGEDSKDVAAPHRQPLTSSERIDKQIRYILDGISALRKETCNKSNMCESSKEALAENNLNLPKMAEKDGCFQSGFNEETCLVKIITGLLEFEVYLEYLQNRFESSEEQARAVQMSTKVLIQFLQKKAKNLDAITTPDPTTNASLLTKLQAQNQWLQDMTTHLILRSFKEFLQSSLRALRQMNWYFDV

SEQ ID NO: 228 - protein, 9 aa, Artificial Sequence
  source: /note="Description of Artificial Sequence: Synthetic peptide"
GFSLSTSGM

SEQ ID NO: 229 - protein, 5 aa, Artificial Sequence
  source: /note="Description of Artificial Sequence: Synthetic peptide"
WWDDK

SEQ ID NO: 230 - protein, 195 aa, Artificial Sequence; identical to SEQ ID NO: 227
  source: /note="Description of Artificial Sequence: Synthetic polypeptide"

SEQ ID NO: 231 - protein, 305 aa, Artificial Sequence
  source: /note="Description of Artificial Sequence: Synthetic polypeptide"
QVTLRESGPALVKPTQTLTLTCTFSGFSLSTSGMSVGWIRQPPGKALEWLADIWWDDKKDYNPSLKSRLTISKDTSKNQVVLKVTNMDPADTATYYCARSMITAPVPPGEDSKDVAAPHRQPLTSSERIDKQIRYILDGISALRKETCNKSNMCESSKEALAENNLNLPKMAEKDGCFQSGFNEETCLVKIITGLLEFEVYLEYLQNRFESSEEQARAVQMSTKVLIQFLQKKAKNLDAITTPDPTTNASLLTKLQAQNQWLQDMTTHLILRSFKEFLQSSLRALRQMNWYFDVWGAGTTVTVSS

SEQ ID NO: 232 - protein, 635 aa, Artificial Sequence
  source: /note="Description of Artificial Sequence: Synthetic polypeptide"
QVTLRESGPALVKPTQTLTLTCTFSGFSLSTSGMSVGWIRQPPGKALEWLADIWWDDKKDYNPSLKSRLTISKDTSKNQVVLKVTNMDPADTATYYCARSMITAPVPPGEDSKDVAAPHRQPLTSSERIDKQIRYILDGISALRKETCNKSNMCESSKEALAENNLNLPKMAEKDGCFQSGFNEETCLVKIITGLLEFEVYLEYLQNRFESSEEQARAVQMSTKVLIQFLQKKAKNLDAITTPDPTTNASLLTKLQAQNQWLQDMTTHLILRSFKEFLQSSLRALRQMNWYFDVWGAGTTVTVSSASTKGPSVFPLAPSSKSTSGGTAALGCLVKDYFPEPVTVSWNSGALTSGVHTFPAVLQSSGLYSLSSVVTVPSSSLGTQTYICNVNHKPSNTKVDKRVEPKSCDKTHTCPPCPAPELLGGPSVFLFPPKPKDTLMISRTPEVTCVVVAVSHEDPEVKFNWYVDGVEVHNAKTKPREEQYNSTYRVVSVLTVLHQDWLNGKEYKCKVSNKALAAPIEKTISKAKGQPREPQVYTLPPSREEMTKNQVSLTCLVKGFYPSDIAVEWESNGQPENNYKTTPPVLDSDGSFFLYSKLTVDKSRWQQGNVFSCSVMHEALHNHYTQKSLSLSPGK

SEQ ID NO: 233 - protein, 10 aa, Artificial Sequence
  source: /note="Description of Artificial Sequence: Synthetic peptide"
KAQLSVGYMH

SEQ ID NO: 234 - protein, 7 aa, Artificial Sequence
  source: /note="Description of Artificial Sequence: Synthetic peptide"
DTSKLAS

SEQ ID NO: 235 - protein, 9 aa, Artificial Sequence
  source: /note="Description of Artificial Sequence: Synthetic peptide"
FQGSGYPFT

SEQ ID NO: 236 - protein, 6 aa, Artificial Sequence
  source: /note="Description of Artificial Sequence: Synthetic peptide"
QLSVGY

SEQ ID NO: 237 - protein, 3 aa, Artificial Sequence
  source: /note="Description of Artificial Sequence: Synthetic peptide"
DTS

SEQ ID NO: 238 - protein, 6 aa, Artificial Sequence
  source: /note="Description of Artificial Sequence: Synthetic peptide"
GSGYPF

SEQ ID NO: 239 - protein, 106 aa, Artificial Sequence; identical to SEQ ID NO: 15
  source: /note="Description of Artificial Sequence: Synthetic polypeptide"

SEQ ID NO: 240 - protein, 213 aa, Artificial Sequence; identical to SEQ ID NO: 16
  source: /note="Description of Artificial Sequence: Synthetic polypeptide"

SEQ ID NO: 241 - protein, 7 aa, Artificial Sequence
  source: /note="Description of Artificial Sequence: Synthetic peptide"
TSGMSVG

SEQ ID NO: 242 - protein, 15 aa, Artificial Sequence
  source: /note="Description of Artificial Sequence: Synthetic peptide"
DIWWDDKKDYNPSLK

SEQ ID NO: 243 - protein, 10 aa, Artificial Sequence
  source: /note="Description of Artificial Sequence: Synthetic peptide"
SMITNWYFDV

SEQ ID NO: 244 - protein, 9 aa, Artificial Sequence
  source: /note="Description of Artificial Sequence: Synthetic peptide"
GFSLSTSGM

SEQ ID NO: 245 - protein, 5 aa, Artificial Sequence
  source: /note="Description of Artificial Sequence: Synthetic peptide"
WWDDK

SEQ ID NO: 246 - protein, 10 aa, Artificial Sequence
  source: /note="Description of Artificial Sequence: Synthetic peptide"
SMITNWYFDV

SEQ ID NO: 247 - protein, 120 aa, Artificial Sequence; identical to SEQ ID NO: 55
  source: /note="Description of Artificial Sequence: Synthetic polypeptide"

SEQ ID NO: 248 - protein, 450 aa, Artificial Sequence; identical to SEQ ID NO: 56
  source: /note="Description of Artificial Sequence: Synthetic polypeptide"

SEQ ID NO: 249 - protein, 195 aa, Artificial Sequence
  source: /note="Description of Artificial Sequence: Synthetic polypeptide"
KAQLSAPVPPGEDSKDVAAPHRQPLTSSERIDKQIRYILDGISALRKETCNKSNMCESSKEALAENNLNLPKMAEKDGCFQSGFNEETCLVKIITGLLEFEVYLEYLQNRFESSEEQARAVQMSTKVLIQFLQKKAKNLDAITTPDPTTNASLLTKLQAQNQWLQDMTTHLILRSFKEFLQSSLRALRQMVGYMH

SEQ ID NO: 250 - protein, 7 aa, Artificial Sequence
  source: /note="Description of Artificial Sequence: Synthetic peptide"
DTSKLAS

SEQ ID NO: 251 - protein, 9 aa, Artificial Sequence
  source: /note="Description of Artificial Sequence: Synthetic peptide"
FQGSGYPFT

SEQ ID NO: 252 - protein, 191 aa, Artificial Sequence
  source: /note="Description of Artificial Sequence: Synthetic polypeptide"
QLSAPVPPGEDSKDVAAPHRQPLTSSERIDKQIRYILDGISALRKETCNKSNMCESSKEALAENNLNLPKMAEKDGCFQSGFNEETCLVKIITGLLEFEVYLEYLQNRFESSEEQARAVQMSTKVLIQFLQKKAKNLDAITTPDPTTNASLLTKLQAQNQWLQDMTTHLILRSFKEFLQSSLRALRQMVGY

SEQ ID NO: 253 - protein, 3 aa, Artificial Sequence
  source: /note="Description of Artificial Sequence: Synthetic peptide"
DTS

SEQ ID NO: 254 - protein, 6 aa, Artificial Sequence
  source: /note="Description of Artificial Sequence: Synthetic peptide"
GSGYPF

SEQ ID NO: 255 - protein, 291 aa, Artificial Sequence
  source: /note="Description of Artificial Sequence: Synthetic polypeptide"
DIQMTQSPSTLSASVGDRVTITCKAQLSAPVPPGEDSKDVAAPHRQPLTSSERIDKQIRYILDGISALRKETCNKSNMCESSKEALAENNLNLPKMAEKDGCFQSGFNEETCLVKIITGLLEFEVYLEYLQNRFESSEEQARAVQMSTKVLIQFLQKKAKNLDAITTPDPTTNASLLTKLQAQNQWLQDMTTHLILRSFKEFLQSSLRALRQMVGYMHWYQQKPGKAPKLLIYDTSKLASGVPSRFSGSGSGTEFTLTISSLQPDDFATYYCFQGSGYPFTFGGGTKLEIK

SEQ ID NO: 256 - protein, 398 aa, Artificial Sequence
  source: /note="Description of Artificial Sequence: Synthetic polypeptide"
DIQMTQSPSTLSASVGDRVTITCKAQLSAPVPPGEDSKDVAAPHRQPLTSSERIDKQIRYILDGISALRKETCNKSNMCESSKEALAENNLNLPKMAEKDGCFQSGFNEETCLVKIITGLLEFEVYLEYLQNRFESSEEQARAVQMSTKVLIQFLQKKAKNLDAITTPDPTTNASLLTKLQAQNQWLQDMTTHLILRSFKEFLQSSLRALRQMVGYMHWYQQKPGKAPKLLIYDTSKLASGVPSRFSGSGSGTEFTLTISSLQPDDFATYYCFQGSGYPFTFGGGTKLEIKRTVAAPSVFIFPPSDEQLKSGTASVVCLLNNFYPREAKVQWKVDNALQSGNSQESVTEQDSKDSTYSLSSTLTLSKADYEKHKVYACEVTHQGLSSPVTKSFNRGEC

SEQ ID NO: 257 - protein, 7 aa, Artificial Sequence
  source: /note="Description of Artificial Sequence: Synthetic peptide"
TSGMSVG

SEQ ID NO: 258 - protein, 15 aa, Artificial Sequence
  source: /note="Description of Artificial Sequence: Synthetic peptide"
DIWWDDKKDYNPSLK

SEQ ID NO: 259 - protein, 10 aa, Artificial Sequence
  source: /note="Description of Artificial Sequence: Synthetic peptide"
SMITNWYFDV

SEQ ID NO: 260 - protein, 9 aa, Artificial Sequence
  source: /note="Description of Artificial Sequence: Synthetic peptide"
GFSLSTSGM

SEQ ID NO: 261 - protein, 5 aa, Artificial Sequence
  source: /note="Description of Artificial Sequence: Synthetic peptide"
WWDDK

SEQ ID NO: 262 - protein, 10 aa, Artificial Sequence
  source: /note="Description of Artificial Sequence: Synthetic peptide"
SMITNWYFDV

SEQ ID NO: 263 - protein, 120 aa, Artificial Sequence; identical to SEQ ID NO: 55
  source: /note="Description of Artificial Sequence: Synthetic polypeptide"

SEQ ID NO: 264 - protein, 450 aa, Artificial Sequence; identical to SEQ ID NO: 56
  source: /note="Description of Artificial Sequence: Synthetic polypeptide"

SEQ ID NO: 265 - protein, 10 aa, Artificial Sequence
  source: /note="Description of Artificial Sequence: Synthetic peptide"
KAQLSVGYMH

SEQ ID NO: 266 - protein, 192 aa, Artificial Sequence
  source: /note="Description of Artificial Sequence: Synthetic polypeptide"
DTAPVPPGEDSKDVAAPHRQPLTSSERIDKQIRYILDGISALRKETCNKSNMCESSKEALAENNLNLPKMAEKDGCFQSGFNEETCLVKIITGLLEFEVYLEYLQNRFESSEEQARAVQMSTKVLIQFLQKKAKNLDAITTPDPTTNASLLTKLQAQNQWLQDMTTHLILRSFKEFLQSSLRALRQMSKLAS

SEQ ID NO: 267 - protein, 9 aa, Artificial Sequence
  source: /note="Description of Artificial Sequence: Synthetic peptide"
FQGSGYPFT

SEQ ID NO: 268 - protein, 6 aa, Artificial Sequence
  source: /note="Description of Artificial Sequence: Synthetic peptide"
QLSVGY

SEQ ID NO: 269 - protein, 188 aa, Artificial Sequence
  source: /note="Description of Artificial Sequence: Synthetic polypeptide"
DTAPVPPGEDSKDVAAPHRQPLTSSERIDKQIRYILDGISALRKETCNKSNMCESSKEALAENNLNLPKMAEKDGCFQSGFNEETCLVKIITGLLEFEVYLEYLQNRFESSEEQARAVQMSTKVLIQFLQKKAKNLDAITTPDPTTNASLLTKLQAQNQWLQDMTTHLILRSFKEFLQSSLRALRQMS

SEQ ID NO: 270 - protein, 6 aa, Artificial Sequence
  source: /note="Description of Artificial Sequence: Synthetic peptide"
GSGYPF

SEQ ID NO: 271 - protein, 291 aa, Artificial Sequence
  source: /note="Description of Artificial Sequence: Synthetic polypeptide"
DIQMTQSPSTLSASVGDRVTITCKAQLSVGYMHWYQQKPGKAPKLLIYDTAPVPPGEDSKDVAAPHRQPLTSSERIDKQIRYILDGISALRKETCNKSNMCESSKEALAENNLNLPKMAEKDGCFQSGFNEETCLVKIITGLLEFEVYLEYLQNRFESSEEQARAVQMSTKVLIQFLQKKAKNLDAITTPDPTTNASLLTKLQAQNQWLQDMTTHLILRSFKEFLQSSLRALRQMSKLASGVPSRFSGSGSGTEFTLTISSLQPDDFATYYCFQGSGYPFTFGGGTKLEIK

SEQ ID NO: 272 - protein, 398 aa, Artificial Sequence
  source: /note="Description of Artificial Sequence: Synthetic polypeptide"
DIQMTQSPSTLSASVGDRVTITCKAQLSVGYMHWYQQKPGKAPKLLIYDTAPVPPGEDSKDVAAPHRQPLTSSERIDKQIRYILDGISALRKETCNKSNMCESSKEALAENNLNLPKMAEKDGCFQSGFNEETCLVKIITGLLEFEVYLEYLQNRFESSEEQARAVQMSTKVLIQFLQKKAKNLDAITTPDPTTNASLLTKLQAQNQWLQDMTTHLILRSFKEFLQSSLRALRQMSKLASGVPSRFSGSGSGTEFTLTISSLQPDDFATYYCFQGSGYPFTFGGGTKLEIKRTVAAPSVFIFPPSDEQLKSGTASVVCLLNNFYPREAKVQWKVDNALQSGNSQESVTEQDSKDSTYSLSSTLTLSKADYEKHKVYACEVTHQGLSSPVTKSFNRGEC

SEQ ID NO: 273 - protein, 7 aa, Artificial Sequence
  source: /note="Description of Artificial Sequence: Synthetic peptide"
TSGMSVG

SEQ ID NO: 274 - protein, 15 aa, Artificial Sequence
  source: /note="Description of Artificial Sequence: Synthetic peptide"
DIWWDDKKDYNPSLK

SEQ ID NO: 275 - protein, 10 aa, Artificial Sequence
  source: /note="Description of Artificial Sequence: Synthetic peptide"
SMITNWYFDV

SEQ ID NO: 276 - protein, 9 aa, Artificial Sequence
  source: /note="Description of Artificial Sequence: Synthetic peptide"
GFSLSTSGM

SEQ ID NO: 277 - protein, 5 aa, Artificial Sequence
  source: /note="Description of Artificial Sequence: Synthetic peptide"
WWDDK

SEQ ID NO: 278 - protein, 10 aa, Artificial Sequence
  source: /note="Description of Artificial Sequence: Synthetic peptide"
SMITNWYFDV

SEQ ID NO: 279 - protein, 120 aa, Artificial Sequence; identical to SEQ ID NO: 55
  source: /note="Description of Artificial Sequence: Synthetic polypeptide"

SEQ ID NO: 280 - protein, 450 aa, Artificial Sequence; identical to SEQ ID NO: 56
  source: /note="Description of Artificial Sequence: Synthetic polypeptide"

SEQ ID NO: 281 - protein, 10 aa, Artificial Sequence
  source: /note="Description of Artificial Sequence: Synthetic peptide"
KAQLSVGYMH

SEQ ID NO: 282 - protein, 7 aa, Artificial Sequence
  source: /note="Description of Artificial Sequence: Synthetic peptide"
DTSKLAS

SEQ ID NO: 283 - protein, 194 aa, Artificial Sequence
  source: /note="Description of Artificial Sequence: Synthetic polypeptide"
FQGSGAPVPPGEDSKDVAAPHRQPLTSSERIDKQIRYILDGISALRKETCNKSNMCESSKEALAENNLNLPKMAEKDGCFQSGFNEETCLVKIITGLLEFEVYLEYLQNRFESSEEQARAVQMSTKVLIQFLQKKAKNLDAITTPDPTTNASLLTKLQAQNQWLQDMTTHLILRSFKEFLQSSLRALRQMYPFT

SEQ ID NO: 284 - protein, 6 aa, Artificial Sequence
  source: /note="Description of Artificial Sequence: Synthetic peptide"
QLSVGY

SEQ ID NO: 285 - protein, 3 aa, Artificial Sequence
  source: /note="Description of Artificial Sequence: Synthetic peptide"
DTS

SEQ ID NO: 286 - protein, 191 aa, Artificial Sequence
  source: /note="Description of Artificial Sequence: Synthetic polypeptide"
GSGAPVPPGEDSKDVAAPHRQPLTSSERIDKQIRYILDGISALRKETCNKSNMCESSKEALAENNLNLPKMAEKDGCFQSGFNEETCLVKIITGLLEFEVYLEYLQNRFESSEEQARAVQMSTKVLIQFLQKKAKNLDAITTPDPTTNASLLTKLQAQNQWLQDMTTHLILRSFKEFLQSSLRALRQMYPF

SEQ ID NO: 287 - protein, 291 aa, Artificial Sequence
  source: /note="Description of Artificial Sequence: Synthetic polypeptide"
DIQMTQSPSTLSASVGDRVTITCKAQLSVGYMHWYQQKPGKAPKLLIYDTSKLASGVPSRFSGSGSGTEFTLTISSLQPDDFATYYCFQGSGAPVPPGEDSKDVAAPHRQPLTSSERIDKQIRYILDGISALRKETCNKSNMCESSKEALAENNLNLPKMAEKDGCFQSGFNEETCLVKIITGLLEFEVYLEYLQNRFESSEEQARAVQMSTKVLIQFLQKKAKNLDAITTPDPTTNASLLTKLQAQNQWLQDMTTHLILRSFKEFLQSSLRALRQMYPFTFGGGTKLEIK

SEQ ID NO: 288 - protein, 398 aa, Artificial Sequence
  source: /note="Description of Artificial Sequence: Synthetic polypeptide"
DIQMTQSPSTLSASVGDRVTITCKAQLSVGYMHWYQQKPGKAPKLLIYDTSKLASGVPSRFSGSGSGTEFTLTISSLQPDDFATYYCFQGSGAPVPPGEDSKDVAAPHRQPLTSSERIDKQIRYILDGISALRKETCNKSNMCESSKEALAENNLNLPKMAEKDGCFQSGFNEETCLVKIITGLLEFEVYLEYLQNRFESSEEQARAVQMSTKVLIQFLQKKAKNLDAITTPDPTTNASLLTKLQAQNQWLQDMTTHLILRSFKEFLQSSLRALRQMYPFTFGGGTKLEIKRTVAAPSVFIFPPSDEQLKSGTASVVCLLNNFYPREAKVQWKVDNALQSGNSQESVTEQDSKDSTYSLSSTLTLSKADYEKHKVYACEVTHQGLSSPVTKSFNRGEC

SEQ ID NO: 289 - protein, 128 aa, Artificial Sequence
  source: /note="Description of Artificial Sequence: Synthetic polypeptide"
PSTQPWEHVNAIQEARRLLNLSRDTAAEMNETVEVISEMFDLQEPTCLQTRLELYKQGLRGSLTKLKGPLTMMASHYKQHCPPTPETSCATQIITFESFKENLKDFLLVIPFDCWEPVQESTSGMSVG

SEQ ID NO: 290 - protein, 16 aa, Artificial Sequence
  source: /note="Description of Artificial Sequence: Synthetic peptide"
DIWWDDKKDYNPSLKS

SEQ ID NO: 291 - protein, 10 aa, Artificial Sequence
  source: /note="Description of Artificial Sequence: Synthetic peptide"
SMITNWYFDV

SEQ ID NO: 292 - protein, 130 aa, Artificial Sequence
  source: /note="Description of Artificial Sequence: Synthetic polypeptide"
GFSLSPSTQPWEHVNAIQEARRLLNLSRDTAAEMNETVEVISEMFDLQEPTCLQTRLELYKQGLRGSLTKLKGPLTMMASHYKQHCPPTPETSCATQIITFESFKENLKDFLLVIPFDCWEPVQESTSGM

SEQ ID NO: 293 - protein, 5 aa, Artificial Sequence
  source: /note="Description of Artificial Sequence: Synthetic peptide"
WWDDK

SEQ ID NO: 294 - protein, 10 aa, Artificial Sequence
  source: /note="Description of Artificial Sequence: Synthetic peptide"
SMITNWYFDV

SEQ ID NO: 295 - protein, 241 aa, Artificial Sequence
  source: /note="Description of Artificial Sequence: Synthetic polypeptide"
QVTLRESGPALVKPTQTLTLTCTFSGFSLSPSTQPWEHVNAIQEARRLLNLSRDTAAEMNETVEVISEMFDLQEPTCLQTRLELYKQGLRGSLTKLKGPLTMMASHYKQHCPPTPETSCATQIITFESFKENLKDFLLVIPFDCWEPVQESTSGMSVGWIRQPPGKALEWLADIWWDDKKDYNPSLKSRLTISKDTSANQVVLKVTNMDPADTATYYCARSMITNWYFDVWGAGTTVTVSS

SEQ ID NO: 296 - protein, 571 aa, Artificial Sequence
  source: /note="Description of Artificial Sequence: Synthetic polypeptide"
QVTLRESGPALVKPTQTLTLTCTFSGFSLSPSTQPWEHVNAIQEARRLLNLSRDTAAEMNETVEVISEMFDLQEPTCLQTRLELYKQGLRGSLTKLKGPLTMMASHYKQHCPPTPETSCATQIITFESFKENLKDFLLVIPFDCWEPVQESTSGMSVGWIRQPPGKALEWLADIWWDDKKDYNPSLKSRLTISKDTSANQVVLKVTNMDPADTATYYCARSMITNWYFDVWGAGTTVTVSSASTKGPSVFPLAPSSKSTSGGTAALGCLVKDYFPEPVTVSWNSGALTSGVHTFPAVLQSSGLYSLSSVVTVPSSSLGTQTYICNVNHKPSNTKVDKRVEPKSCDKTHTCPPCPAPELLGGPSVFLFPPKPKDTLMISRTPEVTCVVVAVSHEDPEVKFNWYVDGVEVHNAKTKPREEQYNSTYRVVSVLTVLHQDWLNGKEYKCKVSNKALAAPIEKTISKAKGQPREPQVYTLPPSREEMTKNQVSLTCLVKGFYPSDIAVEWESNGQPENNYKTTPPVLDSDGSFFLYSKLTVDKSRWQQGNVFSCSVMHEALHNHYTQKSLSLSPGK

SEQ ID NO: 297 - protein, 10 aa, Artificial Sequence
  source: /note="Description of Artificial Sequence: Synthetic peptide"
KAQLSVGYMH

SEQ ID NO: 298 - protein, 7 aa, Artificial Sequence
  source: /note="Description of Artificial Sequence: Synthetic peptide"
DTSKLAS

SEQ ID NO: 299 - protein, 9 aa, Artificial Sequence
  source: /note="Description of Artificial Sequence: Synthetic peptide"
FQGSGYPFT

SEQ ID NO: 300 - protein, 6 aa, Artificial Sequence
  source: /note="Description of Artificial Sequence: Synthetic peptide"
QLSVGY

SEQ ID NO: 301 - protein, 3 aa, Artificial Sequence
  source: /note="Description of Artificial Sequence: Synthetic peptide"
DTS

SEQ ID NO: 302 - protein, 6 aa, Artificial Sequence
  source: /note="Description of Artificial Sequence: Synthetic peptide"
GSGYPF

SEQ ID NO: 303 - protein, 106 aa, Artificial Sequence; identical to SEQ ID NO: 15
  source: /note="Description of Artificial Sequence: Synthetic polypeptide"

SEQ ID NO: 304 - protein, 213 aa, Artificial Sequence; identical to SEQ ID NO: 16
  source: /note="Description of Artificial Sequence: Synthetic polypeptide"

SEQ ID NO: 305 - protein, 7 aa, Artificial Sequence
  source: /note="Description of Artificial Sequence: Synthetic peptide"
TSGMSVG

SEQ ID NO: 306 - protein, 137 aa, Artificial Sequence
  source: /note="Description of Artificial Sequence: Synthetic polypeptide"
DIWWDSPSTQPWEHVNAIQEARRLLNLSRDTAAEMNETVEVISEMFDLQEPTCLQTRLELYKQGLRGSLTKLKGPLTMMASHYKQHCPPTPETSCATQIITFESFKENLKDFLLVIPFDCWEPVQEDKKDYNPSLKS

SEQ ID NO: 307 - protein, 10 aa, Artificial Sequence
  source: /note="Description of Artificial Sequence: Synthetic peptide"
SMITNWYFDV

SEQ ID NO: 308 - protein, 9 aa, Artificial Sequence
  source: /note="Description of Artificial Sequence: Synthetic peptide"
GFSLSTSGM

SEQ ID NO: 309 - protein, 126 aa, Artificial Sequence
  source: /note="Description of Artificial Sequence: Synthetic polypeptide"
WWDSPSTQPWEHVNAIQEARRLLNLSRDTAAEMNETVEVISEMFDLQEPTCLQTRLELYKQGLRGSLTKLKGPLTMMASHYKQHCPPTPETSCATQIITFESFKENLKDFLLVIPFDCWEPVQEDK

SEQ ID NO: 310 - protein, 10 aa, Artificial Sequence
  source: /note="Description of Artificial Sequence: Synthetic peptide"
SMITNWYFDV

SEQ ID NO: 311 - protein, 241 aa, Artificial Sequence
  source: /note="Description of Artificial Sequence: Synthetic polypeptide"
QVTLRESGPALVKPTQTLTLTCTFSGFSLSTSGMSVGWIRQPPGKALEWLADIWWDSPSTQPWEHVNAIQEARRLLNLSRDTAAEMNETVEVISEMFDLQEPTCLQTRLELYKQGLRGSLTKLKGPLTMMASHYKQHCPPTPETSCATQIITFESFKENLKDFLLVIPFDCWEPVQEDKKDYNPSLKSRLTISKDTSANQVVLKVTNMDPADTATYYCARSMITNWYFDVWGAGTTVTVSS

SEQ ID NO: 312 - protein, 571 aa, Artificial Sequence
  source: /note="Description of Artificial Sequence: Synthetic polypeptide"
QVTLRESGPALVKPTQTLTLTCTFSGFSLSTSGMSVGWIRQPPGKALEWLADIWWDSPSTQPWEHVNAIQEARRLLNLSRDTAAEMNETVEVISEMFDLQEPTCLQTRLELYKQGLRGSLTKLKGPLTMMASHYKQHCPPTPETSCATQIITFESFKENLKDFLLVIPFDCWEPVQEDKKDYNPSLKSRLTISKDTSANQVVLKVTNMDPADTATYYCARSMITNWYFDVWGAGTTVTVSSASTKGPSVFPLAPSSKSTSGGTAALGCLVKDYFPEPVTVSWNSGALTSGVHTFPAVLQSSGLYSLSSVVTVPSSSLGTQTYICNVNHKPSNTKVDKRVEPKSCDKTHTCPPCPAPELLGGPSVFLFPPKPKDTLMISRTPEVTCVVVAVSHEDPEVKFNWYVDGVEVHNAKTKPREEQYNSTYRVVSVLTVLHQDWLNGKEYKCKVSNKALAAPIEKTISKAKGQPREPQVYTLPPSREEMTKNQVSLTCLVKGFYPSDIAVEWESNGQPENNYKTTPPVLDSDGSFFLYSKLTVDKSRWQQGNVFSCSVMHEALHNHYTQKSLSLSPGK

SEQ ID NO: 313 - protein, 10 aa, Artificial Sequence
  source: /note="Description of Artificial Sequence: Synthetic peptide"
KAQLSVGYMH

SEQ ID NO: 314 - protein, 7 aa, Artificial Sequence
  source: /note="Description of Artificial Sequence: Synthetic peptide"
DTSKLAS

SEQ ID NO: 315 - protein, 9 aa, Artificial Sequence
  source: /note="Description of Artificial Sequence: Synthetic peptide"
FQGSGYPFT

SEQ ID NO: 316 - protein, 6 aa, Artificial Sequence
  source: /note="Description of Artificial Sequence: Synthetic peptide"
QLSVGY

SEQ ID NO: 317 - protein, 3 aa, Artificial Sequence
  source: /note="Description of Artificial Sequence: Synthetic peptide"
DTS

SEQ ID NO: 318 - protein, 6 aa, Artificial Sequence
  source: /note="Description of Artificial Sequence: Synthetic peptide"
GSGYPF

SEQ ID NO: 319 - protein, 106 aa, Artificial Sequence; identical to SEQ ID NO: 15
  source: /note="Description of Artificial Sequence: Synthetic polypeptide"

SEQ ID NO: 320 - protein, 213 aa, Artificial Sequence; identical to SEQ ID NO: 16
  source: /note="Description of Artificial Sequence: Synthetic polypeptide"

SEQ ID NO: 321 - protein, 7 aa, Artificial Sequence
  source: /note="Description of Artificial Sequence: Synthetic peptide"
TSGMSVG

SEQ ID NO: 322 - protein, 16 aa, Artificial Sequence
  source: /note="Description of Artificial Sequence: Synthetic peptide"
DIWWDDKKDYNPSLKS

SEQ ID NO: 323 - protein, 131 aa, Artificial Sequence
  source: /note="Description of Artificial Sequence: Synthetic polypeptide"
SMITSPSTQPWEHVNAIQEARRLLNLSRDTAAEMNETVEVISEMFDLQEPTCLQTRLELYKQGLRGSLTKLKGPLTMMASHYKQHCPPTPETSCATQIITFESFKENLKDFLLVIPFDCWEPVQENWYFDV

SEQ ID NO: 324 - protein, 9 aa, Artificial Sequence
  source: /note="Description of Artificial Sequence: Synthetic peptide"
GFSLSTSGM

SEQ ID NO: 325 - protein, 5 aa, Artificial Sequence
  source: /note="Description of Artificial Sequence: Synthetic peptide"
WWDDK

SEQ ID NO: 326 - protein, 131 aa, Artificial Sequence; identical to SEQ ID NO: 323
  source: /note="Description of Artificial Sequence: Synthetic polypeptide"

SEQ ID NO: 327 - protein, 241 aa, Artificial Sequence
  source: /note="Description of Artificial Sequence: Synthetic polypeptide"
QVTLRESGPALVKPTQTLTLTCTFSGFSLSTSGMSVGWIRQPPGKALEWLADIWWDDKKDYNPSLKSRLTISKDTSKNQVVLKVTNMDPADTATYYCARSMITSPSTQPWEHVNAIQEARRLLNLSRDTAAEMNETVEVISEMFDLQEPTCLQTRLELYKQGLRGSLTKLKGPLTMMASHYKQHCPPTPETSCATQIITFESFKENLKDFLLVIPFDCWEPVQENWYFDVWGAGTTVTVSS

SEQ ID NO: 328 - protein, 571 aa, Artificial Sequence
  source: /note="Description of Artificial Sequence: Synthetic polypeptide"
QVTLRESGPALVKPTQTLTLTCTFSGFSLSTSGMSVGWIRQPPGKALEWLADIWWDDKKDYNPSLKSRLTISKDTSKNQVVLKVTNMDPADTATYYCARSMITSPSTQPWEHVNAIQEARRLLNLSRDTAAEMNETVEVISEMFDLQEPTCLQTRLELYKQGLRGSLTKLKGPLTMMASHYKQHCPPTPETSCATQIITFESFKENLKDFLLVIPFDCWEPVQENWYFDVWGAGTTVTVSSASTKGPSVFPLAPSSKSTSGGTAALGCLVKDYFPEPVTVSWNSGALTSGVHTFPAVLQSSGLYSLSSVVTVPSSSLGTQTYICNVNHKPSNTKVDKRVEPKSCDKTHTCPPCPAPELLGGPSVFLFPPKPKDTLMISRTPEVTCVVVAVSHEDPEVKFNWYVDGVEVHNAKTKPREEQYNSTYRVVSVLTVLHQDWLNGKEYKCKVSNKALAAPIEKTISKAKGQPREPQVYTLPPSREEMTKNQVSLTCLVKGFYPSDIAVEWESNGQPENNYKTTPPVLDSDGSFFLYSKLTVDKSRWQQGNVFSCSVMHEALHNHYTQKSLSLSPGK

SEQ ID NO: 329 - protein, 10 aa, Artificial Sequence
  source: /note="Description of Artificial Sequence: Synthetic peptide"
KAQLSVGYMH

SEQ ID NO: 330 - protein, 7 aa, Artificial Sequence
  source: /note="Description of Artificial Sequence: Synthetic peptide"
DTSKLAS

SEQ ID NO: 331 - protein, 9 aa, Artificial Sequence
  source: /note="Description of Artificial Sequence: Synthetic peptide"
FQGSGYPFT

SEQ ID NO: 332 - protein, 6 aa, Artificial Sequence
  source: /note="Description of Artificial Sequence: Synthetic peptide"
QLSVGY

SEQ ID NO: 333 - protein, 3 aa, Artificial Sequence
  source: /note="Description of Artificial Sequence: Synthetic peptide"
DTS

SEQ ID NO: 334 - protein, 6 aa, Artificial Sequence
  source: /note="Description of Artificial Sequence: Synthetic peptide"
GSGYPF

SEQ ID NO: 335 - protein, 106 aa, Artificial Sequence; identical to SEQ ID NO: 15
  source: /note="Description of Artificial Sequence: Synthetic polypeptide"

SEQ ID NO: 336 - protein, 213 aa, Artificial Sequence; identical to SEQ ID NO: 16
  source: /note="Description of Artificial Sequence: Synthetic polypeptide"

SEQ ID NO: 337 - protein, 7 aa, Artificial Sequence
  source: /note="Description of Artificial Sequence: Synthetic peptide"
TSGMSVG

SEQ ID NO: 338 - protein, 15 aa, Artificial Sequence
  source: /note="Description of Artificial Sequence: Synthetic peptide"
DIWWDDKKDYNPSLK

SEQ ID NO: 339 - protein, 10 aa, Artificial Sequence
  source: /note="Description of Artificial Sequence: Synthetic peptide"
SMITNWYFDV

SEQ ID NO: 340 - protein, 9 aa, Artificial Sequence
  source: /note="Description of Artificial Sequence: Synthetic peptide"
GFSLSTSGM

SEQ ID NO: 341 - protein, 5 aa, Artificial Sequence
  source: /note="Description of Artificial Sequence: Synthetic peptide"
WWDDK

SEQ ID NO: 342 - protein, 10 aa, Artificial Sequence
  source: /note="Description of Artificial Sequence: Synthetic peptide"
SMITNWYFDV

SEQ ID NO: 343 - protein, 120 aa, Artificial Sequence; identical to SEQ ID NO: 55
  source: /note="Description of Artificial Sequence: Synthetic polypeptide"

SEQ ID NO: 344 - protein, 450 aa, Artificial Sequence; identical to SEQ ID NO: 56
  source: /note="Description of Artificial Sequence: Synthetic polypeptide"

SEQ ID NO: 345 - protein, 131 aa, Artificial Sequence
  source: /note="Description of Artificial Sequence: Synthetic polypeptide"
KAQLSSPSTQPWEHVNAIQEARRLLNLSRDTAAEMNETVEVISEMFDLQEPTCLQTRLELYKQGLRGSLTKLKGPLTMMASHYKQHCPPTPETSCATQIITFESFKENLKDFLLVIPFDCWEPVQEVGYMH

SEQ ID NO: 346 - protein, 7 aa, Artificial Sequence
  source: /note="Description of Artificial Sequence: Synthetic peptide"
DTSKLAS

SEQ ID NO: 347 - protein, 9 aa, Artificial Sequence
  source: /note="Description of Artificial Sequence: Synthetic peptide"
FQGSGYPFT

SEQ ID NO: 348 - protein, 127 aa, Artificial Sequence
  source: /note="Description of Artificial Sequence: Synthetic polypeptide"
QLSSPSTQPWEHVNAIQEARRLLNLSRDTAAEMNETVEVISEMFDLQEPTCLQTRLELYKQGLRGSLTKLKGPLTMMASHYKQHCPPTPETSCATQIITFESFKENLKDFLLVIPFDCWEPVQEVGY

SEQ ID NO: 349 - protein, 3 aa, Artificial Sequence
  source: /note="Description of Artificial Sequence: Synthetic peptide"
DTS

SEQ ID NO: 350 - protein, 6 aa, Artificial Sequence
  source: /note="Description of Artificial Sequence: Synthetic peptide"
GSGYPF

SEQ ID NO: 351 - protein, 227 aa, Artificial Sequence
  source: /note="Description of Artificial Sequence: Synthetic polypeptide"
DIQMTQSPSTLSASVGDRVTITCKAQLSSPSTQPWEHVNAIQEARRLLNLSRDTAAEMNETVEVISEMFDLQEPTCLQTRLELYKQGLRGSLTKLKGPLTMMASHYKQHCPPTPETSCATQIITFESFKENLKDFLLVIPFDCWEPVQEVGYMHWYQQKPGKAPKLLIYDTSKLASGVPSRFSGSGSGTEFTLTISSLQPDDFATYYCFQGSGYPFTFGGGTKLEIK

SEQ ID NO: 352 - protein, 334 aa, Artificial Sequence
  source: /note="Description of Artificial Sequence: Synthetic polypeptide"
DIQMTQSPSTLSASVGDRVTITCKAQLSSPSTQPWEHVNAIQEARRLLNLSRDTAAEMNETVEVISEMFDLQEPTCLQTRLELYKQGLRGSLTKLKGPLTMMASHYKQHCPPTPETSCATQIITFESFKENLKDFLLVIPFDCWEPVQEVGYMHWYQQKPGKAPKLLIYDTSKLASGVPSRFSGSGSGTEFTLTISSLQPDDFATYYCFQGSGYPFTFGGGTKLEIKRTVAAPSVFIFPPSDEQLKSGTASVVCLLNNFYPREAKVQWKVDNALQSGNSQESVTEQDSKDSTYSLSSTLTLSKADYEKHKVYACEVTHQGLSSPVTKSFNRGEC

SEQ ID NO: 353 - protein, 7 aa, Artificial Sequence
  source: /note="Description of Artificial Sequence: Synthetic peptide"
TSGMSVG

SEQ ID NO: 354 - protein, 15 aa, Artificial Sequence
  source: /note="Description of Artificial Sequence: Synthetic peptide"
DIWWDDKKDYNPSLK

SEQ ID NO: 355 - protein, 10 aa, Artificial Sequence
  source: /note="Description of Artificial Sequence: Synthetic peptide"
SMITNWYFDV

SEQ ID NO: 356 - protein, 9 aa, Artificial Sequence
  source: /note="Description of Artificial Sequence: Synthetic peptide"
GFSLSTSGM

SEQ ID NO: 357 - protein, 5 aa, Artificial Sequence
  source: /note="Description of Artificial Sequence: Synthetic peptide"
WWDDK

SEQ ID NO: 358 - protein, 10 aa, Artificial Sequence
  source: /note="Description of Artificial Sequence: Synthetic peptide"
SMITNWYFDV

SEQ ID NO: 359 - protein, 120 aa, Artificial Sequence; identical to SEQ ID NO: 55
  source: /note="Description of Artificial Sequence: Synthetic polypeptide"

SEQ ID NO: 360 - protein, 450 aa, Artificial Sequence; identical to SEQ ID NO: 56
  source: /note="Description of Artificial Sequence: Synthetic polypeptide"

SEQ ID NO: 361 - protein, 10 aa, Artificial Sequence
  source: /note="Description of Artificial Sequence: Synthetic peptide"
KAQLSVGYMH

SEQ ID NO: 362 - protein, 128 aa, Artificial Sequence
  source: /note="Description of Artificial Sequence: Synthetic polypeptide"
DTSPSTQPWEHVNAIQEARRLLNLSRDTAAEMNETVEVISEMFDLQEPTCLQTRLELYKQGLRGSLTKLKGPLTMMASHYKQHCPPTPETSCATQIITFESFKENLKDFLLVIPFDCWEPVQESKLAS

SEQ ID NO: 363 - protein, 9 aa, Artificial Sequence
  source: /note="Description of Artificial Sequence: Synthetic peptide"
FQGSGYPFT

SEQ ID NO: 364 - protein, 6 aa, Artificial Sequence
  source: /note="Description of Artificial Sequence: Synthetic peptide"
QLSVGY

SEQ ID NO: 365 - protein, 124 aa, Artificial Sequence
  source: /note="Description of Artificial Sequence: Synthetic polypeptide"
DTSPSTQPWEHVNAIQEARRLLNLSRDTAAEMNETVEVISEMFDLQEPTCLQTRLELYKQGLRGSLTKLKGPLTMMASHYKQHCPPTPETSCATQIITFESFKENLKDFLLVIPFDCWEPVQES

SEQ ID NO: 366 - protein, 6 aa, Artificial Sequence
  source: /note="Description of Artificial Sequence: Synthetic peptide"
GSGYPF

SEQ ID NO: 367 - protein, 227 aa, Artificial Sequence
  source: /note="Description of Artificial Sequence: Synthetic polypeptide"
DIQMTQSPSTLSASVGDRVTITCKAQLSVGYMHWYQQKPGKAPKLLIYDTSPSTQPWEHVNAIQEARRLLNLSRDTAAEMNETVEVISEMFDLQEPTCLQTRLELYKQGLRGSLTKLKGPLTMMASHYKQHCPPTPETSCATQIITFESFKENLKDFLLVIPFDCWEPVQESKLASGVPSRFSGSGSGTEFTLTISSLQPDDFATYYCFQGSGYPFTFGGGTKLEIK

SEQ ID NO: 368 - protein, 334 aa, Artificial Sequence
  source: /note="Description of Artificial Sequence: Synthetic polypeptide"
DIQMTQSPSTLSASVGDRVTITCKAQLSVGYMHWYQQKPGKAPKLLIYDTSPSTQPWEHVNAIQEARRLLNLSRDTAAEMNETVEVISEMFDLQEPTCLQTRLELYKQGLRGSLTKLKGPLTMMASHYKQHCPPTPETSCATQIITFESFKENLKDFLLVIPFDCWEPVQESKLASGVPSRFSGSGSGTEFTLTISSLQPDDFATYYCFQGSGYPFTFGGGTKLEIKRTVAAPSVFIFPPSDEQLKSGTASVVCLLNNFYPREAKVQWKVDNALQSGNSQESVTEQDSKDSTYSLSSTLTLSKADYEKHKVYACEVTHQGLSSPVTKSFNRGEC

SEQ ID NO: 369 - protein, 7 aa, Artificial Sequence
  source: /note="Description of Artificial Sequence: Synthetic peptide"
TSGMSVG

SEQ ID NO: 370 - protein, 15 aa, Artificial Sequence
  source: /note="Description of Artificial Sequence: Synthetic peptide"
DIWWDDKKDYNPSLK

SEQ ID NO: 371 - protein, 10 aa, Artificial Sequence
  source: /note="Description of Artificial Sequence: Synthetic peptide"
SMITNWYFDV

SEQ ID NO: 372 - protein, 9 aa, Artificial Sequence
  source: /note="Description of Artificial Sequence: Synthetic peptide"
GFSLSTSGM

SEQ ID NO: 373 - protein, 5 aa, Artificial Sequence
  source: /note="Description of Artificial Sequence: Synthetic peptide"
WWDDK

SEQ ID NO: 374 - protein, 10 aa, Artificial Sequence
  source: /note="Description of Artificial Sequence: Synthetic peptide"
SMITNWYFDV

SEQ ID NO: 375 - protein, 120 aa, Artificial Sequence; identical to SEQ ID NO: 55
  source: /note="Description of Artificial Sequence: Synthetic polypeptide"

SEQ ID NO: 376 - protein, 450 aa, Artificial Sequence; identical to SEQ ID NO: 56
  source: /note="Description of Artificial Sequence: Synthetic polypeptide"

SEQ ID NO: 377 - protein, 10 aa, Artificial Sequence
  source: /note="Description of Artificial Sequence: Synthetic peptide"
KAQLSVGYMH

SEQ ID NO: 378 - protein, 7 aa, Artificial Sequence
  source: /note="Description of Artificial Sequence: Synthetic peptide"
DTSKLAS

SEQ ID NO: 379 - protein, 130 aa, Artificial Sequence
  source: /note="Description of Artificial Sequence: Synthetic polypeptide"
FQGSGSPSTQPWEHVNAIQEARRLLNLSRDTAAEMNETVEVISEMFDLQEPTCLQTRLELYKQGLRGSLTKLKGPLTMMASHYKQHCPPTPETSCATQIITFESFKENLKDFLLVIPFDCWEPVQEYPFT

SEQ ID NO: 380 - protein, 6 aa, Artificial Sequence
  source: /note="Description of Artificial Sequence: Synthetic peptide"
QLSVGY

SEQ ID NO: 381 - protein, 3 aa, Artificial Sequence
  source: /note="Description of Artificial Sequence: Synthetic peptide"
DTS

SEQ ID NO: 382 - protein, 127 aa, Artificial Sequence
  source: /note="Description of Artificial Sequence: Synthetic polypeptide"
GSGSPSTQPWEHVNAIQEARRLLNLSRDTAAEMNETVEVISEMFDLQEPTCLQTRLELYKQGLRGSLTKLKGPLTMMASHYKQHCPPTPETSCATQIITFESFKENLKDFLLVIPFDCWEPVQEYPF

SEQ ID NO: 383 - protein, 227 aa, Artificial Sequence
  source: /note="Description of Artificial Sequence: Synthetic polypeptide"
DIQMTQSPSTLSASVGDRVTITCKAQLSVGYMHWYQQKPGKAPKLLIYDTSKLASGVPSRFSGSGSGTEFTLTISSLQPDDFATYYCFQGSGSPSTQPWEHVNAIQEARRLLNLSRDTAAEMNETVEVISEMFDLQEPTCLQTRLELYKQGLRGSLTKLKGPLTMMASHYKQHCPPTPETSCATQIITFESFKENLKDFLLVIPFDCWEPVQEYPFTFGGGTKLEIK

SEQ ID NO: 384 - protein, 334 aa, Artificial Sequence
  source: /note="Description of Artificial Sequence: Synthetic polypeptide"
DIQMTQSPSTLSASVGDRVTITCKAQLSVGYMHWYQQKPGKAPKLLIYDTSKLASGVPSRFSGSGSGTEFTLTISSLQPDDFATYYCFQGSGSPSTQPWEHVNAIQEARRLLNLSRDTAAEMNETVEVISEMFDLQEPTCLQTRLELYKQGLRGSLTKLKGPLTMMASHYKQHCPPTPETSCATQIITFESFKENLKDFLLVIPFDCWEPVQEYPFTFGGGTKLEIKRTVAAPSVFIFPPSDEQLKSGTASVVCLLNNFYPREAKVQWKVDNALQSGNSQESVTEQDSKDSTYSLSSTLTLSKADYEKHKVYACEVTHQGLSSPVTKSFNRGEC

SEQ ID NO: 385 - protein, 182 aa, Artificial Sequence
  source: /note="Description of Artificial Sequence: Synthetic polypeptide"
IRSDLTALTESYVKHQGLNKNINLDSADGMPVASTDQWSELTEAERLQENLQAYRTFHVLLARLLEDQQVHFTPTEGDFHQAIHTLLLQVAAFAYQIEELMILLEYKIPRNEADGMPINVGDGGLFEKKLWGLKVLQELSQWTVRSIHDLRFISSHQTGIPARGSHYIANNKKMSTSGMSVG

SEQ ID NO: 386 - protein, 16 aa, Artificial Sequence
  source: /note="Description of Artificial Sequence: Synthetic peptide"
DIWWDDKKDYNPSLKS

SEQ ID NO: 387 - protein, 10 aa, Artificial Sequence
  source: /note="Description of Artificial Sequence: Synthetic peptide"
SMITNWYFDV

SEQ ID NO: 388 - protein, 184 aa, Artificial Sequence
  source: /note="Description of Artificial Sequence: Synthetic polypeptide"
GFSLKIRSDLTALTESYVKHQGLNKNINLDSADGMPVASTDQWSELTEAERLQENLQAYRTFHVLLARLLEDQQVHFTPTEGDFHQAIHTLLLQVAAFAYQIEELMILLEYKIPRNEADGMPINVGDGGLFEKKLWGLKVLQELSQWTVRSIHDLRFISSHQTGIPARGSHYIANNKKMSTSGM

SEQ ID NO: 389 - protein, 5 aa, Artificial Sequence
  source: /note="Description of Artificial Sequence: Synthetic peptide"
WWDDK

SEQ ID NO: 390 - protein, 10 aa, Artificial Sequence
  source: /note="Description of Artificial Sequence: Synthetic peptide"
SMITNWYFDV

SEQ ID NO: 391 - protein, 295 aa, Artificial Sequence
  source: /note="Description of Artificial Sequence: Synthetic polypeptide"
QVTLRESGPALVKPTQTLTLTCTFSGFSLKIRSDLTALTESYVKHQGLNKNINLDSADGMPVASTDQWSELTEAERLQENLQAYRTFHVLLARLLEDQQVHFTPTEGDFHQAIHTLLLQVAAFAYQIEELMILLEYKIPRNEADGMPINVGDGGLFEKKLWGLKVLQELSQWTVRSIHDLRFISSHQTGIPARGSHYIANNKKMSTSGMSVGWIRQPPGKALEWLADIWWDDKKDYNPSLKSRLTISKDTSKNQVVLKVTNMDPADTATYYCARSMITNWYFDVWGAGTTVTVSS

SEQ ID NO: 392 - protein, 625 aa, Artificial Sequence
  source: /note="Description of Artificial Sequence: Synthetic polypeptide"
QVTLRESGPALVKPTQTLTLTCTFSGFSLKIRSDLTALTESYVKHQGLNKNINLDSADGMPVASTDQWSELTEAERLQENLQAYRTFHVLLARLLEDQQVHFTPTEGDFHQAIHTLLLQVAAFAYQIEELMILLEYKIPRNEADGMPINVGDGGLFEKKLWGLKVLQELSQWTVRSIHDLRFISSHQTGIPARGSHYIANNKKMSTSGMSVGWIRQPPGKALEWLADIWWDDKKDYNPSLKSRLTISKDTSKNQVVLKVTNMDPADTATYYCARSMITNWYFDVWGAGTTVTVSSASTKGPSVFPLAPSSKSTSGGTAALGCLVKDYFPEPVTVSWNSGALTSGVHTFPAVLQSSGLYSLSSVVTVPSSSLGTQTYICNVNHKPSNTKVDKRVEPKSCDKTHTCPPCPAPELLGGPSVFLFPPKPKDTLMISRTPEVTCVVVAVSHEDPEVKFNWYVDGVEVHNAKTKPREEQYNSTYRVVSVLTVLHQDWLNGKEYKCKVSNKALAAPIEKTISKAKGQPREPQVYTLPPSREEMTKNQVSLTCLVKGFYPSDIAVEWESNGQPENNYKTTPPVLDSDGSFFLYSKLTVDKSRWQQGNVFSCSVMHEALHNHYTQKSLSLSPGK

SEQ ID NO: 393 - protein, 10 aa, Artificial Sequence
  source: /note="Description of Artificial Sequence: Synthetic peptide"
KAQLSVGYMH

SEQ ID NO: 394 - protein, 7 aa, Artificial Sequence
  source: /note="Description of Artificial Sequence: Synthetic peptide"
DTSKLAS

SEQ ID NO: 395 - protein, 9 aa, Artificial Sequence
  source: /note="Description of Artificial Sequence: Synthetic peptide"
FQGSGYPFT

SEQ ID NO: 396 - protein, 6 aa, Artificial Sequence
  source: /note="Description of Artificial Sequence: Synthetic peptide"
QLSVGY

SEQ ID NO: 397 - protein, 3 aa, Artificial Sequence
  source: /note="Description of Artificial Sequence: Synthetic peptide"
DTS

SEQ ID NO: 398 - protein, 6 aa, Artificial Sequence
  source: /note="Description of Artificial Sequence: Synthetic peptide"
GSGYPF

SEQ ID NO: 399 - protein, 106 aa, Artificial Sequence; identical to SEQ ID NO: 15
  source: /note="Description of Artificial Sequence: Synthetic polypeptide"

SEQ ID NO: 400 - protein, 213 aa, Artificial Sequence; identical to SEQ ID NO: 16
  source: /note="Description of Artificial Sequence: Synthetic polypeptide"

SEQ ID NO: 401 - protein, 7 aa, Artificial Sequence
  source: /note="Description of Artificial Sequence: Synthetic peptide"
TSGMSVG

SEQ ID NO: 402 - protein, 191 aa, Artificial Sequence
  source: /note="Description of Artificial Sequence: Synthetic polypeptide"
DIWWDKIRSDLTALTESYVKHQGLNKNINLDSADGMPVASTDQWSELTEAERLQENLQAYRTFHVLLARLLEDQQVHFTPTEGDFHQAIHTLLLQVAAFAYQIEELMILLEYKIPRNEADGMPINVGDGGLFEKKLWGLKVLQELSQWTVRSIHDLRFISSHQTGIPARGSHYIANNKKMDKKDYNPSLKS

SEQ ID NO: 403 - protein, 10 aa, Artificial Sequence
  source: /note="Description of Artificial Sequence: Synthetic peptide"
SMITNWYFDV

SEQ ID NO: 404 - protein, 9 aa, Artificial Sequence
  source: /note="Description of Artificial Sequence: Synthetic peptide"
GFSLSTSGM

SEQ ID NO: 405 - protein, 180 aa, Artificial Sequence
  source: /note="Description of Artificial Sequence: Synthetic polypeptide"
WWDKIRSDLTALTESYVKHQGLNKNINLDSADGMPVASTDQWSELTEAERLQENLQAYRTFHVLLARLLEDQQVHFTPTEGDFHQAIHTLLLQVAAFAYQIEELMILLEYKIPRNEADGMPINVGDGGLFEKKLWGLKVLQELSQWTVRSIHDLRFISSHQTGIPARGSHYIANNKKMDK

SEQ ID NO: 406 - protein, 10 aa, Artificial Sequence
  source: /note="Description of Artificial Sequence: Synthetic peptide"
SMITNWYFDV

SEQ ID NO: 407 - protein, 295 aa, Artificial Sequence
  source: /note="Description of Artificial Sequence: Synthetic polypeptide"
QVTLRESGPALVKPTQTLTLTCTFSGFSLSTSGMSVGWIRQPPGKALEWLADIWWDKIRSDLTALTESYVKHQGLNKNINLDSADGMPVASTDQWSELTEAERLQENLQAYRTFHVLLARLLEDQQVHFTPTEGDFHQAIHTLLLQVAAFAYQIEELMILLEYKIPRNEADGMPINVGDGGLFEKKLWGLKVLQELSQWTVRSIHDLRFISSHQTGIPARGSHYIANNKKMDKKDYNPSLKSRLTISKDTSKNQVVLKVTNMDPADTATYYCARSMITNWYFDVWGAGTTVTVSS

SEQ ID NO: 408 - protein, 625 aa, Artificial Sequence
  source: /note="Description of Artificial Sequence: Synthetic polypeptide"
QVTLRESGPALVKPTQTLTLTCTFSGFSLSTSGMSVGWIRQPPGKALEWLADIWWDKIRSDLTALTESYVKHQGLNKNINLDSADGMPVASTDQWSELTEAERLQENLQAYRTFHVLLARLLEDQQVHFTPTEGDFHQAIHTLLLQVAAFAYQIEELMILLEYKIPRNEADGMPINVGDGGLFEKKLWGLKVLQELSQWTVRSIHDLRFISSHQTGIPARGSHYIANNKKMDKKDYNPSLKSRLTISKDTSKNQVVLKVTNMDPADTATYYCARSMITNWYFDVWGAGTTVTVSSASTKGPSVFPLAPSSKSTSGGTAALGCLVKDYFPEPVTVSWNSGALTSGVHTFPAVLQSSGLYSLSSVVTVPSSSLGTQTYICNVNHKPSNTKVDKRVEPKSCDKTHTCPPCPAPELLGGPSVFLFPPKPKDTLMISRTPEVTCVVVAVSHEDPEVKFNWYVDGVEVHNAKTKPREEQYNSTYRVVSVLTVLHQDWLNGKEYKCKVSNKALAAPIEKTISKAKGQPREPQVYTLPPSREEMTKNQVSLTCLVKGFYPSDIAVEWESNGQPENNYKTTPPVLDSDGSFFLYSKLTVDKSRWQQGNVFSCSVMHEALHNHYTQKSLSLSPGK

SEQ ID NO: 409 - protein, 10 aa, Artificial Sequence
  source: /note="Description of Artificial Sequence: Synthetic peptide"
KAQLSVGYMH

SEQ ID NO: 410 - protein, 7 aa, Artificial Sequence
  source: /note="Description of Artificial Sequence: Synthetic peptide"
DTSKLAS

SEQ ID NO: 411 - protein, 9 aa, Artificial Sequence
  source: /note="Description of Artificial Sequence: Synthetic peptide"
FQGSGYPFT

SEQ ID NO: 412 - protein, 6 aa, Artificial Sequence
  source: /note="Description of Artificial Sequence: Synthetic peptide"
QLSVGY

SEQ ID NO: 413 - protein, 3 aa, Artificial Sequence
  source: /note="Description of Artificial Sequence: Synthetic peptide"
DTS

SEQ ID NO: 414 - protein, 6 aa, Artificial Sequence
  source: /note="Description of Artificial Sequence: Synthetic peptide"
GSGYPF

SEQ ID NO: 415 - protein, 106 aa, Artificial Sequence; identical to SEQ ID NO: 15
  source: /note="Description of Artificial Sequence: Synthetic polypeptide"

SEQ ID NO: 416 - protein, 213 aa, Artificial Sequence; identical to SEQ ID NO: 16
  source: /note="Description of Artificial Sequence: Synthetic polypeptide"

SEQ ID NO: 417 - protein, 7 aa, Artificial Sequence
  source: /note="Description of Artificial Sequence: Synthetic peptide"
TSGMSVG

SEQ ID NO: 418 - protein, 16 aa, Artificial Sequence
  source: /note="Description of Artificial Sequence: Synthetic peptide"
DIWWDDKKDYNPSLKS

SEQ ID NO: 419 - protein, 185 aa, Artificial Sequence
  source: /note="Description of Artificial Sequence: Synthetic polypeptide"
SMITKIRSDLTALTESYVKHQGLNKNINLDSADGMPVASTDQWSELTEAERLQENLQAYRTFHVLLARLLEDQQVHFTPTEGDFHQAIHTLLLQVAAFAYQIEELMILLEYKIPRNEADGMPINVGDGGLFEKKLWGLKVLQELSQWTVRSIHDLRFISSHQTGIPARGSHYIANNKKMNWYFDV

SEQ ID NO: 420 - protein, 9 aa, Artificial Sequence
  source: /note="Description of Artificial Sequence: Synthetic peptide"
GFSLSTSGM

SEQ ID NO: 421 - protein, 5 aa, Artificial Sequence
  source: /note="Description of Artificial Sequence: Synthetic peptide"
WWDDK

SEQ ID NO: 422 - protein, 185 aa, Artificial Sequence; identical to SEQ ID NO: 419
  source: /note="Description of Artificial Sequence: Synthetic polypeptide"

SEQ ID NO: 423 - protein, 295 aa, Artificial Sequence
  source: /note="Description of Artificial Sequence: Synthetic polypeptide"
QVTLRESGPALVKPTQTLTLTCTFSGFSLSTSGMSVGWIRQPPGKALEWLADIWWDDKKDYNPSLKSRLTISKDTSKNQVVLKVTNMDPADTATYYCARSMITKIRSDLTALTESYVKHQGLNKNINLDSADGMPVASTDQWSELTEAERLQENLQAYRTFHVLLARLLEDQQVHFTPTEGDFHQAIHTLLLQVAAFAYQIEELMILLEYKIPRNEADGMPINVGDGGLFEKKLWGLKVLQELSQWTVRSIHDLRFISSHQTGIPARGSHYIANNKKMNWYFDVWGAGTTVTVSS

SEQ ID NO: 424 - protein, 625 aa, Artificial Sequence
  source: /note="Description of Artificial Sequence: Synthetic polypeptide"
QVTLRESGPALVKPTQTLTLTCTFSGFSLSTSGMSVGWIRQPPGKALEWLADIWWDDKKDYNPSLKSRLTISKDTSKNQVVLKVTNMDPADTATYYCARSMITKIRSDLTALTESYVKHQGLNKNINLDSADGMPVASTDQWSELTEAERLQENLQAYRTFHVLLARLLEDQQVHFTPTEGDFHQAIHTLLLQVAAFAYQIEELMILLEYKIPRNEADGMPINVGDGGLFEKKLWGLKVLQELSQWTVRSIHDLRFISSHQTGIPARGSHYIANNKKMNWYFDVWGAGTTVTVSSASTKGPSVFPLAPSSKSTSGGTAALGCLVKDYFPEPVTVSWNSGALTSGVHTFPAVLQSSGLYSLSSVVTVPSSSLGTQTYICNVNHKPSNTKVDKRVEPKSCDKTHTCPPCPAPELLGGPSVFLFPPKPKDTLMISRTPEVTCVVVAVSHEDPEVKFNWYVDGVEVHNAKTKPREEQYNSTYRVVSVLTVLHQDWLNGKEYKCKVSNKALAAPIEKTISKAKGQPREPQVYTLPPSREEMTKNQVSLTCLVKGFYPSDIAVEWESNGQPENNYKTTPPVLDSDGSFFLYSKLTVDKSRWQQGNVFSCSVMHEALHNHYTQKSLSLSPGK

SEQ ID NO: 425 - protein, 10 aa, Artificial Sequence
  source: /note="Description of Artificial Sequence: Synthetic peptide"
KAQLSVGYMH

SEQ ID NO: 426 - protein, 7 aa, Artificial Sequence
  source: /note="Description of Artificial Sequence: Synthetic peptide"
DTSKLAS

SEQ ID NO: 427 - protein, 9 aa, Artificial Sequence
  source: /note="Description of Artificial Sequence: Synthetic peptide"
FQGSGYPFT

SEQ ID NO: 428 - protein, 6 aa, Artificial Sequence
  source: /note="Description of Artificial Sequence: Synthetic peptide"
QLSVGY

SEQ ID NO: 429 - protein, 3 aa, Artificial Sequence
  source: /note="Description of Artificial Sequence: Synthetic peptide"
DTS

SEQ ID NO: 430 - protein, 6 aa, Artificial Sequence
  source: /note="Description of Artificial Sequence: Synthetic peptide"
GSGYPF

SEQ ID NO: 431 - protein, 106 aa, Artificial Sequence; identical to SEQ ID NO: 15
  source: /note="Description of Artificial Sequence: Synthetic polypeptide"

SEQ ID NO: 432 - protein, 213 aa, Artificial Sequence; identical to SEQ ID NO: 16
  source: /note="Description of Artificial Sequence: Synthetic polypeptide"

SEQ ID NO: 433 - protein, 7 aa, Artificial Sequence
  source: /note="Description of Artificial Sequence: Synthetic peptide"
TSGMSVG

SEQ ID NO: 434 - protein, 15 aa, Artificial Sequence
  source: /note="Description of Artificial Sequence: Synthetic peptide"
DIWWDDKKDYNPSLK

SEQ ID NO: 435 - protein, 10 aa, Artificial Sequence
  source: /note="Description of Artificial Sequence: Synthetic peptide"
SMITNWYFDV

SEQ ID NO: 436 - protein, 9 aa, Artificial Sequence
  source: /note="Description of Artificial Sequence: Synthetic peptide"
GFSLSTSGM

SEQ ID NO: 437 - protein, 5 aa, Artificial Sequence
  source: /note="Description of Artificial Sequence: Synthetic peptide"
WWDDK

SEQ ID NO: 438 - protein, 10 aa, Artificial Sequence
  source: /note="Description of Artificial Sequence: Synthetic peptide"
SMITNWYFDV

SEQ ID NO: 439 - protein, 120 aa, Artificial Sequence; identical to SEQ ID NO: 55
  source: /note="Description of Artificial Sequence: Synthetic polypeptide"

SEQ ID NO: 440 - protein, 450 aa, Artificial Sequence; identical to SEQ ID NO: 56
  source: /note="Description of Artificial Sequence: Synthetic polypeptide"

SEQ ID NO: 441 - protein, 185 aa, Artificial Sequence
  source: /note="Description of Artificial Sequence: Synthetic polypeptide"
KAQLSKIRSDLTALTESYVKHQGLNKNINLDSADGMPVASTDQWSELTEAERLQENLQAYRTFHVLLARLLEDQQVHFTPTEGDFHQAIHTLLLQVAAFAYQIEELMILLEYKIPRNEADGMPINVGDGGLFEKKLWGLKVLQELSQWTVRSIHDLRFISSHQTGIPARGSHYIANNKKMVGYMH

SEQ ID NO: 442 - protein, 7 aa, Artificial Sequence
  source: /note="Description of Artificial Sequence: Synthetic peptide"
DTSKLAS

SEQ ID NO: 443 - protein, 9 aa, Artificial Sequence
  source: /note="Description of Artificial Sequence: Synthetic peptide"
FQGSGYPFT

SEQ ID NO: 444 - protein, 181 aa, Artificial Sequence
  source: /note="Description of Artificial Sequence: Synthetic polypeptide"
QLSKIRSDLTALTESYVKHQGLNKNINLDSADGMPVASTDQWSELTEAERLQENLQAYRTFHVLLARLLEDQQVHFTPTEGDFHQAIHTLLLQVAAFAYQIEELMILLEYKIPRNEADGMPINVGDGGLFEKKLWGLKVLQELSQWTVRSIHDLRFISSHQTGIPARGSHYIANNKKMVGY

SEQ ID NO: 445 - protein, 3 aa, Artificial Sequence
  source: /note="Description of Artificial Sequence: Synthetic peptide"
DTS

SEQ ID NO: 446 - protein, 6 aa, Artificial Sequence
  source: /note="Description of Artificial Sequence: Synthetic peptide"
GSGYPF

SEQ ID NO: 447 - protein, 281 aa, Artificial Sequence
  source: /note="Description of Artificial Sequence: Synthetic polypeptide"
DIQMTQSPSTLSASVGDRVTITCKAQLSKIRSDLTALTESYVKHQGLNKNINLDSADGMPVASTDQWSELTEAERLQENLQAYRTFHVLLARLLEDQQVHFTPTEGDFHQAIHTLLLQVAAFAYQIEELMILLEYKIPRNEADGMPINVGDGGLFEKKLWGLKVLQELSQWTVRSIHDLRFISSHQTGIPARGSHYIANNKKMVGYMHWYQQKPGKAPKLLIYDTSKLASGVPSRFSGSGSGTEFTLTISSLQPDDFATYYCFQGSGYPFTFGGGTKLEIK

SEQ ID NO: 448 - protein, 388 aa, Artificial Sequence
  source: /note="Description of Artificial Sequence: Synthetic polypeptide"
DIQMTQSPSTLSASVGDRVTITCKAQLSKIRSDLTALTESYVKHQGLNKNINLDSADGMPVASTDQWSELTEAERLQENLQAYRTFHVLLARLLEDQQVHFTPTEGDFHQAIHTLLLQVAAFAYQIEELMILLEYKIPRNEADGMPINVGDGGLFEKKLWGLKVLQELSQWTVRSIHDLRFISSHQTGIPARGSHYIANNKKMVGYMHWYQQKPGKAPKLLIYDTSKLASGVPSRFSGSGSGTEFTLTISSLQPDDFATYYCFQGSGYPFTFGGGTKLEIKRTVAAPSVFIFPPSDEQLKSGTASVVCLLNNFYPREAKVQWKVDNALQSGNSQESVTEQDSKDSTYSLSSTLTLSKADYEKHKVYACEVTHQGLSSPVTKSFNRGEC

SEQ ID NO: 449 - protein, 7 aa, Artificial Sequence
  source: /note="Description of Artificial Sequence: Synthetic peptide"
TSGMSVG

SEQ ID NO: 450 - protein, 15 aa, Artificial Sequence
  source: /note="Description of Artificial Sequence: Synthetic peptide"
DIWWDDKKDYNPSLK

SEQ ID NO: 451 - protein, 10 aa, Artificial Sequence
  source: /note="Description of Artificial Sequence: Synthetic peptide"
SMITNWYFDV

SEQ ID NO: 452 - protein, 9 aa, Artificial Sequence
  source: /note="Description of Artificial Sequence: Synthetic peptide"
GFSLSTSGM

SEQ ID NO: 453 - protein, 5 aa, Artificial Sequence
  source: /note="Description of Artificial Sequence: Synthetic peptide"
WWDDK

SEQ ID NO: 454 - protein, 10 aa, Artificial Sequence
  source: /note="Description of Artificial Sequence: Synthetic peptide"
SMITNWYFDV

SEQ ID NO: 455 - protein, 120 aa, Artificial Sequence; identical to SEQ ID NO: 55
  source: /note="Description of Artificial Sequence: Synthetic polypeptide"

SEQ ID NO: 456 - protein, 450 aa, Artificial Sequence; identical to SEQ ID NO: 56
  source: /note="Description of Artificial Sequence: Synthetic polypeptide"

SEQ ID NO: 457 - protein, 10 aa, Artificial Sequence
  source: /note="Description of Artificial Sequence: Synthetic peptide"
KAQLSVGYMH

SEQ ID NO: 458 - protein, 182 aa, Artificial Sequence
  source: /note="Description of Artificial Sequence: Synthetic polypeptide"
DTKIRSDLTALTESYVKHQGLNKNINLDSADGMPVASTDQWSELTEAERLQENLQAYRTFHVLLARLLEDQQVHFTPTEGDFHQAIHTLLLQVAAFAYQIEELMILLEYKIPRNEADGMPINVGDGGLFEKKLWGLKVLQELSQWTVRSIHDLRFISSHQTGIPARGSHYIANNKKMSKLAS

SEQ ID NO: 459 - protein, 9 aa, Artificial Sequence
  source: /note="Description of Artificial Sequence: Synthetic peptide"
FQGSGYPFT

SEQ ID NO: 460 - protein, 6 aa, Artificial Sequence
  source: /note="Description of Artificial Sequence: Synthetic peptide"
QLSVGY

SEQ ID NO: 461 - protein, 178 aa, Artificial Sequence
  source: /note="Description of Artificial Sequence: Synthetic polypeptide"
DTKIRSDLTALTESYVKHQGLNKNINLDSADGMPVASTDQWSELTEAERLQENLQAYRTFHVLLARLLEDQQVHFTPTEGDFHQAIHTLLLQVAAFAYQIEELMILLEYKIPRNEADGMPINVGDGGLFEKKLWGLKVLQELSQWTVRSIHDLRFISSHQTGIPARGSHYIANNKKMS

SEQ ID NO: 462 - protein, 6 aa, Artificial Sequence
  source: /note="Description of Artificial Sequence: Synthetic peptide"
GSGYPF

SEQ ID NO: 463 - protein, 281 aa, Artificial Sequence
  source: /note="Description of Artificial Sequence: Synthetic polypeptide"
DIQMTQSPSTLSASVGDRVTITCKAQLSVGYMHWYQQKPGKAPKLLIYDTKIRSDLTALTESYVKHQGLNKNINLDSADGMPVASTDQWSELTEAERLQENLQAYRTFHVLLARLLEDQQVHFTPTEGDFHQAIHTLLLQVAAFAYQIEELMILLEYKIPRNEADGMPINVGDGGLFEKKLWGLKVLQELSQWTVRSIHDLRFISSHQTGIPARGSHYIANNKKMSKLASGVPSRFSGSGSGTEFTLTISSLQPDDFATYYCFQGSGYPFTFGGGTKLEIK

SEQ ID NO: 464 - protein, 388 aa, Artificial Sequence
  source: /note="Description of Artificial Sequence: Synthetic polypeptide"
DIQMTQSPSTLSASVGDRVTITCKAQLSVGYMHWYQQKPGKAPKLLIYDTKIRSDLTALTESYVKHQGLNKNINLDSADGMPVASTDQWSELTEAERLQENLQAYRTFHVLLARLLEDQQVHFTPTEGDFHQAIHTLLLQVAAFAYQIEELMILLEYKIPRNEADGMPINVGDGGLFEKKLWGLKVLQELSQWTVRSIHDLRFISSHQTGIPARGSHYIANNKKMSKLASGVPSRFSGSGSGTEFTLTISSLQPDDFATYYCFQGSGYPFTFGGGTKLEIKRTVAAPSVFIFPPSDEQLKSGTASVVCLLNNFYPREAKVQWKVDNALQSGNSQESVTEQDSKDSTYSLSSTLTLSKADYEKHKVYACEVTHQGLSSPVTKSFNRGEC

SEQ ID NO: 465 - protein, 7 aa, Artificial Sequence
  source: /note="Description of Artificial Sequence: Synthetic peptide"
TSGMSVG

SEQ ID NO: 466 - protein, 15 aa, Artificial Sequence
  source: /note="Description of Artificial Sequence: Synthetic peptide"
DIWWDDKKDYNPSLK

SEQ ID NO: 467 - protein, 10 aa, Artificial Sequence
  source: /note="Description of Artificial Sequence: Synthetic peptide"
SMITNWYFDV

SEQ ID NO: 468 - protein, 9 aa, Artificial Sequence
  source: /note="Description of Artificial Sequence: Synthetic peptide"
GFSLSTSGM

SEQ ID NO: 469 - protein, 5 aa, Artificial Sequence
  source: /note="Description of Artificial Sequence: Synthetic peptide"
WWDDK

SEQ ID NO: 470 - protein, 10 aa, Artificial Sequence
  source: /note="Description of Artificial Sequence: Synthetic peptide"
SMITNWYFDV

SEQ ID NO: 471 - protein, 120 aa, Artificial Sequence; identical to SEQ ID NO: 55
  source: /note="Description of Artificial Sequence: Synthetic polypeptide"

SEQ ID NO: 472 - protein, 450 aa, Artificial Sequence; identical to SEQ ID NO: 56
  source: /note="Description of Artificial Sequence: Synthetic polypeptide"

SEQ ID NO: 473 - protein, 10 aa, Artificial Sequence
  source: /note="Description of Artificial Sequence: Synthetic peptide"
KAQLSVGYMH

SEQ ID NO: 474 - protein, 7 aa, Artificial Sequence
  source: /note="Description of Artificial Sequence: Synthetic peptide"
DTSKLAS

SEQ ID NO: 475 - protein, 184 aa, Artificial Sequence
  source: /note="Description of Artificial Sequence: Synthetic polypeptide"
FQGSGKIRSDLTALTESYVKHQGLNKNINLDSADGMPVASTDQWSELTEAERLQENLQAYRTFHVLLARLLEDQQVHFTPTEGDFHQAIHTLLLQVAAFAYQIEELMILLEYKIPRNEADGMPINVGDGGLFEKKLWGLKVLQELSQWTVRSIHDLRFISSHQTGIPARGSHYIANNKKMYPFT

SEQ ID NO: 476 - protein, 6 aa, Artificial Sequence
  source: /note="Description of Artificial Sequence: Synthetic peptide"
QLSVGY

SEQ ID NO: 477 - protein, 3 aa, Artificial Sequence
  source: /note="Description of Artificial Sequence: Synthetic peptide"
DTS

SEQ ID NO: 478 - protein, 181 aa, Artificial Sequence
  source: /note="Description of Artificial Sequence: Synthetic polypeptide"
GSGKIRSDLTALTESYVKHQGLNKNINLDSADGMPVASTDQWSELTEAERLQENLQAYRTFHVLLARLLEDQQVHFTPTEGDFHQAIHTLLLQVAAFAYQIEELMILLEYKIPRNEADGMPINVGDGGLFEKKLWGLKVLQELSQWTVRSIHDLRFISSHQTGIPARGSHYIANNKKMYPF

SEQ ID NO: 479 - protein, 281 aa, Artificial Sequence
  source: /note="Description of Artificial Sequence: Synthetic polypeptide"
DIQMTQSPSTLSASVGDRVTITCKAQLSVGYMHWYQQKPGKAPKLLIYDTSKLASGVPSRFSGSGSGTEFTLTISSLQPDDFATYYCFQGSGKIRSDLTALTESYVKHQGLNKNINLDSADGMPVASTDQWSELTEAERLQENLQAYRTFHVLLARLLEDQQVHFTPTEGDFHQAIHTLLLQVAAFAYQIEELMILLEYKIPRNEADGMPINVGDGGLFEKKLWGLKVLQELSQWTVRSIHDLRFISSHQTGIPARGSHYIANNKKMYPFTFGGGTKLEIK

SEQ ID NO: 480 - protein, 388 aa, Artificial Sequence
  source: /note="Description of Artificial Sequence: Synthetic polypeptide"
DIQMTQSPSTLSASVGDRVTITCKAQLSVGYMHWYQQKPGKAPKLLIYDTSKLASGVPSRFSGSGSGTEFTLTISSLQPDDFATYYCFQGSGKIRSDLTALTESYVKHQGLNKNINLDSADGMPVASTDQWSELTEAERLQENLQAYRTFHVLLARLLEDQQVHFTPTEGDFHQAIHTLLLQVAAFAYQIEELMILLEYKIPRNEADGMPINVGDGGLFEKKLWGLKVLQELSQWTVRSIHDLRFISSHQTGIPARGSHYIANNKKMYPFTFGGGTKLEIKRTVAAPSVFIFPPSDEQLKSGTASVVCLLNNFYPREAKVQWKVDNALQSGNSQESVTEQDSKDSTYSLSSTLTLSKADYEKHKVYACEVTHQGLSSPVTKSFNRGEC

SEQ ID NO: 481 - protein, 140 aa, Artificial Sequence
  source: /note="Description of Artificial Sequence: Synthetic polypeptide"
PMTQTTPLKTSWVNCSNMIDEIITHLKQPPLPLLDFNNLNGEDQDILMENNLRRPNLEAFNRAVKSLQNASAIESILKNLLPCLPLATAAPTRHPIHIKDGDWNEFRRKLTFYLKTLENAQAQQTTLSLAIFSTSGMSVG

SEQ ID NO: 482 - protein, 16 aa, Artificial Sequence
  source: /note="Description of Artificial Sequence: Synthetic peptide"
DIWWDDKKDYNPSLKS

SEQ ID NO: 483 - protein, 10 aa, Artificial Sequence
  source: /note="Description of Artificial Sequence: Synthetic peptide"
SMITNWYFDV

SEQ ID NO: 484 - protein, 142 aa, Artificial Sequence
  source: /note="Description of Artificial Sequence: Synthetic polypeptide"
GFSLAPMTQTTPLKTSWVNCSNMIDEIITHLKQPPLPLLDFNNLNGEDQDILMENNLRRPNLEAFNRAVKSLQNASAIESILKNLLPCLPLATAAPTRHPIHIKDGDWNEFRRKLTFYLKTLENAQAQQTTLSLAIFSTSGM

SEQ ID NO: 485 - protein, 5 aa, Artificial Sequence
  source: /note="Description of Artificial Sequence: Synthetic peptide"
WWDDK

SEQ ID NO: 486 - protein, 10 aa, Artificial Sequence
  source: /note="Description of Artificial Sequence: Synthetic peptide"
SMITNWYFDV

SEQ ID NO: 487 - protein, 253 aa, Artificial Sequence
  source: /note="Description of Artificial Sequence: Synthetic polypeptide"
QVTLRESGPALVKPTQTLTLTCTFSGFSLAPMTQTTPLKTSWVNCSNMIDEIITHLKQPPLPLLDFNNLNGEDQDILMENNLRRPNLEAFNRAVKSLQNASAIESILKNLLPCLPLATAAPTRHPIHIKDGDWNEFRRKLTFYLKTLENAQAQQTTLSLAIFSTSGMSVGWIRQPPGKALEWLADIWWDDKKDYNPSLKSRLTISKDTSKNQVVLKVTNMDPADTATYYCARSMITNWYFDVWGAGTTVTVSS

SEQ ID NO: 488 - protein, 583 aa, Artificial Sequence
  source: /note="Description of Artificial Sequence: Synthetic polypeptide"
QVTLRESGPALVKPTQTLTLTCTFSGFSLAPMTQTTPLKTSWVNCSNMIDEIITHLKQPPLPLLDFNNLNGEDQDILMENNLRRPNLEAFNRAVKSLQNASAIESILKNLLPCLPLATAAPTRHPIHIKDGDWNEFRRKLTFYLKTLENAQAQQTTLSLAIFSTSGMSVGWIRQPPGKALEWLADIWWDDKKDYNPSLKSRLTISKDTSKNQVVLKVTNMDPADTATYYCARSMITNWYFDVWGAGTTVTVSSASTKGPSVFPLAPSSKSTSGGTAALGCLVKDYFPEPVTVSWNSGALTSGVHTFPAVLQSSGLYSLSSVVTVPSSSLGTQTYICNVNHKPSNTKVDKRVEPKSCDKTHTCPPCPAPELLGGPSVFLFPPKPKDTLMISRTPEVTCVVVAVSHEDPEVKFNWYVDGVEVHNAKTKPREEQYNSTYRVVSVLTVLHQDWLNGKEYKCKVSNKALAAPIEKTISKAKGQPREPQVYTLPPSREEMTKNQVSLTCLVKGFYPSDIAVEWESNGQPENNYKTTPPVLDSDGSFFLYSKLTVDKSRWQQGNVFSCSVMHEALHNHYTQKSLSLSPGK

SEQ ID NO: 489 - protein, 10 aa, Artificial Sequence
  source: /note="Description of Artificial Sequence: Synthetic peptide"
KAQLSVGYMH

SEQ ID NO: 490 - protein, 7 aa, Artificial Sequence
  source: /note="Description of Artificial Sequence: Synthetic peptide"
DTSKLAS

SEQ ID NO: 491 - protein, 9 aa, Artificial Sequence
  source: /note="Description of Artificial Sequence: Synthetic peptide"
FQGSGYPFT

SEQ ID NO: 492 - protein, 6 aa, Artificial Sequence
  source: /note="Description of Artificial Sequence: Synthetic peptide"
QLSVGY

SEQ ID NO: 493 - protein, 3 aa, Artificial Sequence
  source: /note="Description of Artificial Sequence: Synthetic peptide"
DTS

SEQ ID NO: 494 - protein, 6 aa, Artificial Sequence
  source: /note="Description of Artificial Sequence: Synthetic peptide"
GSGYPF

SEQ ID NO: 495 - protein, 106 aa, Artificial Sequence; identical to SEQ ID NO: 15
  source: /note="Description of Artificial Sequence: Synthetic polypeptide"

SEQ ID NO: 496 - protein, 213 aa, Artificial Sequence; identical to SEQ ID NO: 16
  source: /note="Description of Artificial Sequence: Synthetic polypeptide"

SEQ ID NO: 497 - protein, 7 aa, Artificial Sequence
  source: /note="Description of Artificial Sequence: Synthetic peptide"
TSGMSVG

SEQ ID NO: 498 - protein, 149 aa, Artificial Sequence
  source: /note="Description of Artificial Sequence: Synthetic polypeptide"
DIWWDAPMTQTTPLKTSWVNCSNMIDEIITHLKQPPLPLLDFNNLNGEDQDILMENNLRRPNLEAFNRAVKSLQNASAIESILKNLLPCLPLATAAPTRHPIHIKDGDWNEFRRKLTFYLKTLENAQAQQTTLSLAIFDKKDYNPSLKS

SEQ ID NO: 499 - protein, 10 aa, Artificial Sequence
  source: /note="Description of Artificial Sequence: Synthetic peptide"
SMITNWYFDV

SEQ ID NO: 500 - protein, 9 aa, Artificial Sequence
  source: /note="Description of Artificial Sequence: Synthetic peptide"
GFSLSTSGM

SEQ ID NO: 501 - protein, 138 aa, Artificial Sequence
  source: /note="Description of Artificial Sequence: Synthetic polypeptide"
WWDAPMTQTTPLKTSWVNCSNMIDEIITHLKQPPLPLLDFNNLNGEDQDILMENNLRRPNLEAFNRAVKSLQNASAIESILKNLLPCLPLATAAPTRHPIHIKDGDWNEFRRKLTFYLKTLENAQAQQTTLSLAIFDK

SEQ ID NO: 502 - protein, 10 aa, Artificial Sequence
  source: /note="Description of Artificial Sequence: Synthetic peptide"
SMITNWYFDV

SEQ ID NO: 503 - protein, 253 aa, Artificial Sequence
  source: /note="Description of Artificial Sequence: Synthetic polypeptide"
QVTLRESGPALVKPTQTLTLTCTFSGFSLSTSGMSVGWIRQPPGKALEWLADIWWDAPMTQTTPLKTSWVNCSNMIDEIITHLKQPPLPLLDFNNLNGEDQDILMENNLRRPNLEAFNRAVKSLQNASAIESILKNLLPCLPLATAAPTRHPIHIKDGDWNEFRRKLTFYLKTLENAQAQQTTLSLAIFDKKDYNPSLKSRLTISKDTSANQVVLKVTNMDPADTATYYCARSMITNWYFDVWGAGTTVTVSS

SEQ ID NO: 504 - protein, 583 aa, Artificial Sequence
  source: /note="Description of Artificial Sequence: Synthetic polypeptide"
QVTLRESGPALVKPTQTLTLTCTFSGFSLSTSGMSVGWIRQPPGKALEWLADIWWDAPMTQTTPLKTSWVNCSNMIDEIITHLKQPPLPLLDFNNLNGEDQDILMENNLRRPNLEAFNRAVKSLQNASAIESILKNLLPCLPLATAAPTRHPIHIKDGDWNEFRRKLTFYLKTLENAQAQQTTLSLAIFDKKDYNPSLKSRLTISKDTSANQVVLKVTNMDPADTATYYCARSMITNWYFDVWGAGTTVTVSSASTKGPSVFPLAPSSKSTSGGTAALGCLVKDYFPEPVTVSWNSGALTSGVHTFPAVLQSSGLYSLSSVVTVPSSSLGTQTYICNVNHKPSNTKVDKRVEPKSCDKTHTCPPCPAPELLGGPSVFLFPPKPKDTLMISRTPEVTCVVVAVSHEDPEVKFNWYVDGVEVHNAKTKPREEQYNSTYRVVSVLTVLHQDWLNGKEYKCKVSNKALAAPIEKTISKAKGQPREPQVYTLPPSREEMTKNQVSLTCLVKGFYPSDIAVEWESNGQPENNYKTTPPVLDSDGSFFLYSKLTVDKSRWQQGNVFSCSVMHEALHNHYTQKSLSLSPGK

SEQ ID NO: 505 - protein, 10 aa, Artificial Sequence
  source: /note="Description of Artificial Sequence: Synthetic peptide"
KAQLSVGYMH

SEQ ID NO: 506 - protein, 7 aa, Artificial Sequence
  source: /note="Description of Artificial Sequence: Synthetic peptide"
DTSKLAS

SEQ ID NO: 507 - protein, 9 aa, Artificial Sequence
  source: /note="Description of Artificial Sequence: Synthetic peptide"
FQGSGYPFT

SEQ ID NO: 508 - protein, 6 aa, Artificial Sequence
  source: /note="Description of Artificial Sequence: Synthetic peptide"
QLSVGY

SEQ ID NO: 509 - protein, 3 aa, Artificial Sequence
  source: /note="Description of Artificial Sequence: Synthetic peptide"
DTS

SEQ ID NO: 510 - protein, 6 aa, Artificial Sequence
  source: /note="Description of Artificial Sequence: Synthetic peptide"
GSGYPF

SEQ ID NO: 511 - protein, 106 aa, Artificial Sequence; identical to SEQ ID NO: 15
  source: /note="Description of Artificial Sequence: Synthetic polypeptide"

SEQ ID NO: 512 - protein, 213 aa, Artificial Sequence; identical to SEQ ID NO: 16
  source: /note="Description of Artificial Sequence: Synthetic polypeptide"

SEQ ID NO: 513 - protein, 7 aa, Artificial Sequence
  source: /note="Description of Artificial Sequence: Synthetic peptide"
TSGMSVG

SEQ ID NO: 514 - protein, 16 aa, Artificial Sequence
  source: /note="Description of Artificial Sequence: Synthetic peptide"
DIWWDDKKDYNPSLKS

SEQ ID NO: 515 - protein, 143 aa, Artificial Sequence
  source: /note="Description of Artificial Sequence: Synthetic polypeptide"
SMITAPMTQTTPLKTSWVNCSNMIDEIITHLKQPPLPLLDFNNLNGEDQDILMENNLRRPNLEAFNRAVKSLQNASAIESILKNLLPCLPLATAAPTRHPIHIKDGDWNEFRRKLTFYLKTLENAQAQQTTLSLAIFNWYFDV

SEQ ID NO: 516 - protein, 9 aa, Artificial Sequence
  source: /note="Description of Artificial Sequence: Synthetic peptide"
GFSLSTSGM

SEQ ID NO: 517 - protein, 5 aa, Artificial Sequence
  source: /note="Description of Artificial Sequence: Synthetic peptide"
WWDDK

SEQ ID NO: 518 - protein, 143 aa, Artificial Sequence; identical to SEQ ID NO: 515
  source: /note="Description of Artificial Sequence: Synthetic polypeptide"

SEQ ID NO: 519 - protein, 253 aa, Artificial Sequence
  source: /note="Description of Artificial Sequence: Synthetic polypeptide"
QVTLRESGPALVKPTQTLTLTCTFSGFSLSTSGMSVGWIRQPPGKALEWLADIWWDDKKDYNPSLKSRLTISKDTSKNQVVLKVTNMDPADTATYYCARSMITAPMTQTTPLKTSWVNCSNMIDEIITHLKQPPLPLLDFNNLNGEDQDILMENNLRRPNLEAFNRAVKSLQNASAIESILKNLLPCLPLATAAPTRHPIHIKDGDWNEFRRKLTFYLKTLENAQAQQTTLSLAIFNWYFDVWGAGTTVTVSS

SEQ ID NO: 520 - protein, 583 aa, Artificial Sequence
  source: /note="Description of Artificial Sequence: Synthetic polypeptide"
QVTLRESGPALVKPTQTLTLTCTFSGFSLSTSGMSVGWIRQPPGKALEWLADIWWDDKKDYNPSLKSRLTISKDTSKNQVVLKVTNMDPADTATYYCARSMITAPMTQTTPLKTSWVNCSNMIDEIITHLKQPPLPLLDFNNLNGEDQDILMENNLRRPNLEAFNRAVKSLQNASAIESILKNLLPCLPLATAAPTRHPIHIKDGDWNEFRRKLTFYLKTLENAQAQQTTLSLAIFNWYFDVWGAGTTVTVSSASTKGPSVFPLAPSSKSTSGGTAALGCLVKDYFPEPVTVSWNSGALTSGVHTFPAVLQSSGLYSLSSVVTVPSSSLGTQTYICNVNHKPSNTKVDKRVEPKSCDKTHTCPPCPAPELLGGPSVFLFPPKPKDTLMISRTPEVTCVVVAVSHEDPEVKFNWYVDGVEVHNAKTKPREEQYNSTYRVVSVLTVLHQDWLNGKEYKCKVSNKALAAPIEKTISKAKGQPREPQVYTLPPSREEMTKNQVSLTCLVKGFYPSDIAVEWESNGQPENNYKTTPPVLDSDGSFFLYSKLTVDKSRWQQGNVFSCSVMHEALHNHYTQKSLSLSPGK

SEQ ID NO: 521 - protein, 10 aa, Artificial Sequence
  source: /note="Description of Artificial Sequence: Synthetic peptide"
KAQLSVGYMH

SEQ ID NO: 522 - protein, 7 aa, Artificial Sequence
  source: /note="Description of Artificial Sequence: Synthetic peptide"
DTSKLAS

SEQ ID NO: 523 - protein, 9 aa, Artificial Sequence
  source: /note="Description of Artificial Sequence: Synthetic peptide"
FQGSGYPFT

SEQ ID NO: 524 - protein, 6 aa, Artificial Sequence
  source: /note="Description of Artificial Sequence: Synthetic peptide"
QLSVGY

SEQ ID NO: 525 - protein, 3 aa, Artificial Sequence
  source: /note="Description of Artificial Sequence: Synthetic peptide"
DTS

SEQ ID NO: 526 - protein, 6 aa, Artificial Sequence
  source: /note="Description of Artificial Sequence: Synthetic peptide"
GSGYPF

SEQ ID NO: 527 - protein, 106 aa, Artificial Sequence; identical to SEQ ID NO: 15
  source: /note="Description of Artificial Sequence: Synthetic polypeptide"

SEQ ID NO: 528 - protein, 213 aa, Artificial Sequence; identical to SEQ ID NO: 16
  source: /note="Description of Artificial Sequence: Synthetic polypeptide"

SEQ ID NO: 529 - protein, 7 aa, Artificial Sequence
  source: /note="Description of Artificial Sequence: Synthetic peptide"
TSGMSVG

SEQ ID NO: 530 - protein, 15 aa, Artificial Sequence
  source: /note="Description of Artificial Sequence: Synthetic peptide"
DIWWDDKKDYNPSLK

SEQ ID NO: 531 - protein, 10 aa, Artificial Sequence
  source: /note="Description of Artificial Sequence: Synthetic peptide"
SMITNWYFDV

SEQ ID NO: 532 - protein, 9 aa, Artificial Sequence
  source: /note="Description of Artificial Sequence: Synthetic peptide"
GFSLSTSGM

SEQ ID NO: 533 - protein, 5 aa, Artificial Sequence
  source: /note="Description of Artificial Sequence: Synthetic peptide"
WWDDK

SEQ ID NO: 534 - protein, 10 aa, Artificial Sequence
  source: /note="Description of Artificial Sequence: Synthetic peptide"
SMITNWYFDV

SEQ ID NO: 535 - protein, 120 aa, Artificial Sequence; identical to SEQ ID NO: 55
  source: /note="Description of Artificial Sequence: Synthetic polypeptide"

SEQ ID NO: 536 - protein, 450 aa, Artificial Sequence; identical to SEQ ID NO: 56
  source: /note="Description of Artificial Sequence: Synthetic polypeptide"

SEQ ID NO: 537 - protein, 143 aa, Artificial Sequence
  source: /note="Description of Artificial Sequence: Synthetic polypeptide"
KAQLSAPMTQTTPLKTSWVNCSNMIDEIITHLKQPPLPLLDFNNLNGEDQDILMENNLRRPNLEAFNRAVKSLQNASAIESILKNLLPCLPLATAAPTRHPIHIKDGDWNEFRRKLTFYLKTLENAQAQQTTLSLAIFVGYMH

SEQ ID NO: 538 - protein, 7 aa, Artificial Sequence
  source: /note="Description of Artificial Sequence: Synthetic peptide"
DTSKLAS

SEQ ID NO: 539 - protein, 9 aa, Artificial Sequence
  source: /note="Description of Artificial Sequence: Synthetic peptide"
FQGSGYPFT

SEQ ID NO: 540 - protein, 139 aa, Artificial Sequence
  source: /note="Description of Artificial Sequence: Synthetic polypeptide"
QLSAPMTQTTPLKTSWVNCSNMIDEIITHLKQPPLPLLDFNNLNGEDQDILMENNLRRPNLEAFNRAVKSLQNASAIESILKNLLPCLPLATAAPTRHPIHIKDGDWNEFRRKLTFYLKTLENAQAQQTTLSLAIFVGY

SEQ ID NO: 541 - protein, 3 aa, Artificial Sequence
  source: /note="Description of Artificial Sequence: Synthetic peptide"
DTS

SEQ ID NO: 542 - protein, 6 aa, Artificial Sequence
  source: /note="Description of Artificial Sequence: Synthetic peptide"
GSGYPF

SEQ ID NO: 543 - protein, 239 aa, Artificial Sequence
  source: /note="Description of Artificial Sequence: Synthetic polypeptide"
DIQMTQSPSTLSASVGDRVTITCKAQLSAPMTQTTPLKTSWVNCSNMIDEIITHLKQPPLPLLDFNNLNGEDQDILMENNLRRPNLEAFNRAVKSLQNASAIESILKNLLPCLPLATAAPTRHPIHIKDGDWNEFRRKLTFYLKTLENAQAQQTTLSLAIFVGYMHWYQQKPGKAPKLLIYDTSKLASGVPSRFSGSGSGTEFTLTISSLQPDDFATYYCFQGSGYPFTFGGGTKLEIK

SEQ ID NO: 544 - protein, 346 aa, Artificial Sequence
  source: /note="Description of Artificial Sequence: Synthetic polypeptide"
DIQMTQSPSTLSASVGDRVTITCKAQLSAPMTQTTPLKTSWVNCSNMIDEIITHLKQPPLPLLDFNNLNGEDQDILMENNLRRPNLEAFNRAVKSLQNASAIESILKNLLPCLPLATAAPTRHPIHIKDGDWNEFRRKLTFYLKTLENAQAQQTTLSLAIFVGYMHWYQQKPGKAPKLLIYDTSKLASGVPSRFSGSGSGTEFTLTISSLQPDDFATYYCFQGSGYPFTFGGGTKLEIKRTVAAPSVFIFPPSDEQLKSGTASVVCLLNNFYPREAKVQWKVDNALQSGNSQESVTEQDSKDSTYSLSSTLTLSKADYEKHKVYACEVTHQGLSSPVTKSFNRGEC

SEQ ID NO: 545 - protein, 7 aa, Artificial Sequence
  source: /note="Description of Artificial Sequence: Synthetic peptide"
TSGMSVG

SEQ ID NO: 546 - protein, 15 aa, Artificial Sequence
  source: /note="Description of Artificial Sequence: Synthetic peptide"
DIWWDDKKDYNPSLK

SEQ ID NO: 547 - protein, 10 aa, Artificial Sequence
  source: /note="Description of Artificial Sequence: Synthetic peptide"
SMITNWYFDV

SEQ ID NO: 548 - protein, 9 aa, Artificial Sequence
  source: /note="Description of Artificial Sequence: Synthetic peptide"
GFSLSTSGM

SEQ ID NO: 549 - protein, 5 aa, Artificial Sequence
  source: /note="Description of Artificial Sequence: Synthetic peptide"
WWDDK

SEQ ID NO: 550 - protein, 10 aa, Artificial Sequence
  source: /note="Description of Artificial Sequence: Synthetic peptide"
SMITNWYFDV

SEQ ID NO: 551 - protein, 120 aa, Artificial Sequence; identical to SEQ ID NO: 55
  source: /note="Description of Artificial Sequence: Synthetic polypeptide"

SEQ ID NO: 552 - protein, 450 aa, Artificial Sequence; identical to SEQ ID NO: 56
  source: /note="Description of Artificial Sequence: Synthetic polypeptide"

SEQ ID NO: 553 - protein, 10 aa, Artificial Sequence
  source: /note="Description of Artificial Sequence: Synthetic peptide"
KAQLSVGYMH

SEQ ID NO: 554 - protein, 140 aa, Artificial Sequence
  source: /note="Description of Artificial Sequence: Synthetic polypeptide"
DTAPMTQTTPLKTSWVNCSNMIDEIITHLKQPPLPLLDFNNLNGEDQDILMENNLRRPNLEAFNRAVKSLQNASAIESILKNLLPCLPLATAAPTRHPIHIKDGDWNEFRRKLTFYLKTLENAQAQQTTLSLAIFSKLAS

SEQ ID NO: 555 - protein, 9 aa, Artificial Sequence
  source: /note="Description of Artificial Sequence: Synthetic peptide"
FQGSGYPFT

SEQ ID NO: 556 - protein, 6 aa, Artificial Sequence
  source: /note="Description of Artificial Sequence: Synthetic peptide"
QLSVGY

SEQ ID NO: 557 - protein, 136 aa, Artificial Sequence
  source: /note="Description of Artificial Sequence: Synthetic polypeptide"
DTAPMTQTTPLKTSWVNCSNMIDEIITHLKQPPLPLLDFNNLNGEDQDILMENNLRRPNLEAFNRAVKSLQNASAIESILKNLLPCLPLATAAPTRHPIHIKDGDWNEFRRKLTFYLKTLENAQAQQTTLSLAIFS

SEQ ID NO: 558 - protein, 6 aa, Artificial Sequence
  source: /note="Description of Artificial Sequence: Synthetic peptide"
GSGYPF

SEQ ID NO: 559 - protein, 239 aa, Artificial Sequence
  source: /note="Description of Artificial Sequence: Synthetic polypeptide"
DIQMTQSPSTLSASVGDRVTITCKAQLSVGYMHWYQQKPGKAPKLLIYDTAPMTQTTPLKTSWVNCSNMIDEIITHLKQPPLPLLDFNNLNGEDQDILMENNLRRPNLEAFNRAVKSLQNASAIESILKNLLPCLPLATAAPTRHPIHIKDGDWNEFRRKLTFYLKTLENAQAQQTTLSLAIFSKLASGVPSRFSGSGSGTEFTLTISSLQPDDFATYYCFQGSGYPFTFGGGTKLEIK

SEQ ID NO: 560 - protein, 346 aa, Artificial Sequence
  source: /note="Description of Artificial Sequence: Synthetic polypeptide"
DIQMTQSPSTLSASVGDRVTITCKAQLSVGYMHWYQQKPGKAPKLLIYDTAPMTQTTPLKTSWVNCSNMIDEIITHLKQPPLPLLDFNNLNGEDQDILMENNLRRPNLEAFNRAVKSLQNASAIESILKNLLPCLPLATAAPTRHPIHIKDGDWNEFRRKLTFYLKTLENAQAQQTTLSLAIFSKLASGVPSRFSGSGSGTEFTLTISSLQPDDFATYYCFQGSGYPFTFGGGTKLEIKRTVAAPSVFIFPPSDEQLKSGTASVVCLLNNFYPREAKVQWKVDNALQSGNSQESVTEQDSKDSTYSLSSTLTLSKADYEKHKVYACEVTHQGLSSPVTKSFNRGEC

SEQ ID NO: 561 - protein, 7 aa, Artificial Sequence
  source: /note="Description of Artificial Sequence: Synthetic peptide"
TSGMSVG

SEQ ID NO: 562 - protein, 15 aa, Artificial Sequence
  source: /note="Description of Artificial Sequence: Synthetic peptide"
DIWWDDKKDYNPSLK

SEQ ID NO: 563 - protein, 10 aa, Artificial Sequence
  source: /note="Description of Artificial Sequence: Synthetic peptide"
SMITNWYFDV

SEQ ID NO: 564 - protein, 9 aa, Artificial Sequence
  source: /note="Description of Artificial Sequence: Synthetic peptide"
GFSLSTSGM

SEQ ID NO: 565 - protein, 5 aa, Artificial Sequence
  source: /note="Description of Artificial Sequence: Synthetic peptide"
WWDDK

SEQ ID NO: 566 - protein, 10 aa, Artificial Sequence
  source: /note="Description of Artificial Sequence: Synthetic peptide"
SMITNWYFDV

SEQ ID NO: 567 - protein, 120 aa, Artificial Sequence; identical to SEQ ID NO: 55
  source: /note="Description of Artificial Sequence: Synthetic polypeptide"

SEQ ID NO: 568 - protein, 450 aa, Artificial Sequence; identical to SEQ ID NO: 56
  source: /note="Description of Artificial Sequence: Synthetic polypeptide"

SEQ ID NO: 569 - protein, 10 aa, Artificial Sequence
  source: /note="Description of Artificial Sequence: Synthetic peptide"
KAQLSVGYMH

SEQ ID NO: 570 - protein, 7 aa, Artificial Sequence
  source: /note="Description of Artificial Sequence: Synthetic peptide"
DTSKLAS

SEQ ID NO: 571 - protein, 142 aa, Artificial Sequence
  source: /note="Description of Artificial Sequence: Synthetic polypeptide"
FQGSGAPMTQTTPLKTSWVNCSNMIDEIITHLKQPPLPLLDFNNLNGEDQDILMENNLRRPNLEAFNRAVKSLQNASAIESILKNLLPCLPLATAAPTRHPIHIKDGDWNEFRRKLTFYLKTLENAQAQQTTLSLAIFYPFT

SEQ ID NO: 572 - protein, 6 aa, Artificial Sequence
  source: /note="Description of Artificial Sequence: Synthetic peptide"
QLSVGY

SEQ ID NO: 573 - protein, 3 aa, Artificial Sequence
  source: /note="Description of Artificial Sequence: Synthetic peptide"
DTS

SEQ ID NO: 574 - protein, 139 aa, Artificial Sequence
  source: /note="Description of Artificial Sequence: Synthetic polypeptide"
GSGAPMTQTTPLKTSWVNCSNMIDEIITHLKQPPLPLLDFNNLNGEDQDILMENNLRRPNLEAFNRAVKSLQNASAIESILKNLLPCLPLATAAPTRHPIHIKDGDWNEFRRKLTFYLKTLENAQAQQTTLSLAIFYPF

SEQ ID NO: 575 - protein, 239 aa, Artificial Sequence
  source: /note="Description of Artificial Sequence: Synthetic polypeptide"
DIQMTQSPSTLSASVGDRVTITCKAQLSVGYMHWYQQKPGKAPKLLIYDTSKLASGVPSRFSGSGSGTEFTLTISSLQPDDFATYYCFQGSGAPMTQTTPLKTSWVNCSNMIDEIITHLKQPPLPLLDFNNLNGEDQDILMENNLRRPNLEAFNRAVKSLQNASAIESILKNLLPCLPLATAAPTRHPIHIKDGDWNEFRRKLTFYLKTLENAQAQQTTLSLAIFYPFTFGGGTKLEIK

SEQ ID NO: 576 - protein, 346 aa, Artificial Sequence
  source: /note="Description of Artificial Sequence: Synthetic polypeptide"
DIQMTQSPSTLSASVGDRVTITCKAQLSVGYMHWYQQKPGKAPKLLIYDTSKLASGVPSRFSGSGSGTEFTLTISSLQPDDFATYYCFQGSGAPMTQTTPLKTSWVNCSNMIDEIITHLKQPPLPLLDFNNLNGEDQDILMENNLRRPNLEAFNRAVKSLQNASAIESILKNLLPCLPLATAAPTRHPIHIKDGDWNEFRRKLTFYLKTLENAQAQQTTLSLAIFYPFTFGGGTKLEIKRTVAAPSVFIFPPSDEQLKSGTASVVCLLNNFYPREAKVQWKVDNALQSGNSQESVTEQDSKDSTYSLSSTLTLSKADYEKHKVYACEVTHQGLSSPVTKSFNRGEC

SEQ ID NO: 577 - protein, 203 aa, Artificial Sequence
  source: /note="Description of Artificial Sequence: Synthetic polypeptide"
LPVATPDPGMFPCLHHSQNLLRAVSNMLQKARQTLEFYPCTSEEIDHEDITKDKTSTVEACLPLELTKNESCLNSRETSFITNGSCLASRKTSFMMALCLSSIYEDLKMYQVEFKTMNAKLLMDPKRQIFLDQNMLAVIDELMQALNFNSETVPQKSSLEEPDFYKTKIKLCILLHAFRIRAVTIDRVMSYLNASSTSGMSVG

SEQ ID NO: 578 - protein, 16 aa, Artificial Sequence
  source: /note="Description of Artificial Sequence: Synthetic peptide"
DIWWDDKKDYNPSLKS

SEQ ID NO: 579 - protein, 10 aa, Artificial Sequence
  source: /note="Description of Artificial Sequence: Synthetic peptide"
SMITNWYFDV

SEQ ID NO: 580 - protein, 205 aa, Artificial Sequence
  source: /note="Description of Artificial Sequence: Synthetic polypeptide"
GFSLNLPVATPDPGMFPCLHHSQNLLRAVSNMLQKARQTLEFYPCTSEEIDHEDITKDKTSTVEACLPLELTKNESCLNSRETSFITNGSCLASRKTSFMMALCLSSIYEDLKMYQVEFKTMNAKLLMDPKRQIFLDQNMLAVIDELMQALNFNSETVPQKSSLEEPDFYKTKIKLCILLHAFRIRAVTIDRVMSYLNASSTSGM

SEQ ID NO: 581 - protein, 5 aa, Artificial Sequence
  source: /note="Description of Artificial Sequence: Synthetic peptide"
WWDDK

SEQ ID NO: 582 - protein, 10 aa, Artificial Sequence
  source: /note="Description of Artificial Sequence: Synthetic peptide"
SMITNWYFDV

SEQ ID NO: 583 - protein, 316 aa, Artificial Sequence
  source: /note="Description of Artificial Sequence: Synthetic polypeptide"
QVTLRESGPALVKPTQTLTLTCTFSGFSLNLPVATPDPGMFPCLHHSQNLLRAVSNMLQKARQTLEFYPCTSEEIDHEDITKDKTSTVEACLPLELTKNESCLNSRETSFITNGSCLASRKTSFMMALCLSSIYEDLKMYQVEFKTMNAKLLMDPKRQIFLDQNMLAVIDELMQALNFNSETVPQKSSLEEPDFYKTKIKLCILLHAFRIRAVTIDRVMSYLNASSTSGMSVGWIRQPPGKALEWLADIWWDDKKDYNPSLKSRLTISKDTSKNQVVLKVTNMDPADTATYYCARSMITNWYFDVWGAGTTVTVSS

SEQ ID NO: 584 - protein, 646 aa, Artificial Sequence
  source: /note="Description of Artificial Sequence: Synthetic polypeptide"
QVTLRESGPALVKPTQTLTLTCTFSGFSLNLPVATPDPGMFPCLHHSQNLLRAVSNMLQKARQTLEFYPCTSEEIDHEDITKDKTSTVEACLPLELTKNESCLNSRETSFITNGSCLASRKTSFMMALCLSSIYEDLKMYQVEFKTMNAKLLMDPKRQIFLDQNMLAVIDELMQALNFNSETVPQKSSLEEPDFYKTKIKLCILLHAFRIRAVTIDRVMSYLNASSTSGMSVGWIRQPPGKALEWLADIWWDDKKDYNPSLKSRLTISKDTSKNQVVLKVTNMDPADTATYYCARSMITNWYFDVWGAGTTVTVSSASTKGPSVFPLAPSSKSTSGGTAALGCLVKDYFPEPVTVSWNSGALTSGVHTFPAVLQSSGLYSLSSVVTVPSSSLGTQTYICNVNHKPSNTKVDKRVEPKSCDKTHTCPPCPAPELLGGPSVFLFPPKPKDTLMISRTPEVTCVVVAVSHEDPEVKFNWYVDGVEVHNAKTKPREEQYNSTYRVVSVLTVLHQDWLNGKEYKCKVSNKALAAPIEKTISKAKGQPREPQVYTLPPSREEMTKNQVSLTCLVKGFYPSDIAVEWESNGQPENNYKTTPPVLDSDGSFFLYSKLTVDKSRWQQGNVFSCSVMHEALHNHYTQKSLSLSPGK

SEQ ID NO: 585 - protein, 10 aa, Artificial Sequence
  source: /note="Description of Artificial Sequence: Synthetic peptide"
KAQLSVGYMH

SEQ ID NO: 586 - protein, 7 aa, Artificial Sequence
  source: /note="Description of Artificial Sequence: Synthetic peptide"
DTSKLAS

SEQ ID NO: 587 - protein, 9 aa, Artificial Sequence
  source: /note="Description of Artificial Sequence: Synthetic peptide"
FQGSGYPFT

SEQ ID NO: 588 - protein, 6 aa, Artificial Sequence
  source: /note="Description of Artificial Sequence: Synthetic peptide"
QLSVGY

SEQ ID NO: 589 - protein, 3 aa, Artificial Sequence
  source: /note="Description of Artificial Sequence: Synthetic peptide"
DTS

SEQ ID NO: 590 - protein, 6 aa, Artificial Sequence
  source: /note="Description of Artificial Sequence: Synthetic peptide"
GSGYPF

SEQ ID NO: 591 - protein, 106 aa, Artificial Sequence; identical to SEQ ID NO: 15
  source: /note="Description of Artificial Sequence: Synthetic polypeptide"

SEQ ID NO: 592 - protein, 213 aa, Artificial Sequence; identical to SEQ ID NO: 16
  source: /note="Description of Artificial Sequence: Synthetic polypeptide"

SEQ ID NO: 593 - protein, 7 aa, Artificial Sequence
  source: /note="Description of Artificial Sequence: Synthetic peptide"
TSGMSVG

SEQ ID NO: 594 - protein, 212 aa, Artificial Sequence
  source: /note="Description of Artificial Sequence: Synthetic polypeptide"
DIWWDNLPVATPDPGMFPCLHHSQNLLRAVSNMLQKARQTLEFYPCTSEEIDHEDITKDKTSTVEACLPLELTKNESCLNSRETSFITNGSCLASRKTSFMMALCLSSIYEDLKMYQVEFKTMNAKLLMDPKRQIFLDQNMLAVIDELMQALNFNSETVPQKSSLEEPDFYKTKIKLCILLHAFRIRAVTIDRVMSYLNASDKKDYNPSLKS

SEQ ID NO: 595 - protein, 10 aa, Artificial Sequence
  source: /note="Description of Artificial Sequence: Synthetic peptide"
SMITNWYFDV

SEQ ID NO: 596 - protein, 9 aa, Artificial Sequence
  source: /note="Description of Artificial Sequence: Synthetic peptide"
GFSLSTSGM

SEQ ID NO: 597 - protein, 201 aa, Artificial Sequence
  source: /note="Description of Artificial Sequence: Synthetic polypeptide"
WWDNLPVATPDPGMFPCLHHSQNLLRAVSNMLQKARQTLEFYPCTSEEIDHEDITKDKTSTVEACLPLELTKNESCLNSRETSFITNGSCLASRKTSFMMALCLSSIYEDLKMYQVEFKTMNAKLLMDPKRQIFLDQNMLAVIDELMQALNFNSETVPQKSSLEEPDFYKTKIKLCILLHAFRIRAVTIDRVMSYLNASDK

SEQ ID NO: 598 - protein, 10 aa, Artificial Sequence
  source: /note="Description of Artificial Sequence: Synthetic peptide"
SMITNWYFDV

SEQ ID NO: 599 - protein, 316 aa, Artificial Sequence
  source: /note="Description of Artificial Sequence: Synthetic polypeptide"
QVTLRESGPALVKPTQTLTLTCTFSGFSLSTSGMSVGWIRQPPGKALEWLADIWWDNLPVATPDPGMFPCLHHSQNLLRAVSNMLQKARQTLEFYPCTSEEIDHEDITKDKTSTVEACLPLELTKNESCLNSRETSFITNGSCLASRKTSFMMALCLSSIYEDLKMYQVEFKTMNAKLLMDPKRQIFLDQNMLAVIDELMQALNFNSETVPQKSSLEEPDFYKTKIKLCILLHAFRIRAVTIDRVMSYLNASDKKDYNPSLKSRLTISKDTSANQVVLKVTNMDPADTATYYCARSMITNWYFDVWGAGTTVTVSS

SEQ ID NO: 600 - protein, 646 aa, Artificial Sequence
  source: /note="Description of Artificial Sequence: Synthetic polypeptide"
QVTLRESGPALVKPTQTLTLTCTFSGFSLSTSGMSVGWIRQPPGKALEWLADIWWDNLPVATPDPGMFPCLHHSQNLLRAVSNMLQKARQTLEFYPCTSEEIDHEDITKDKTSTVEACLPLELTKNESCLNSRETSFITNGSCLASRKTSFMMALCLSSIYEDLKMYQVEFKTMNAKLLMDPKRQIFLDQNMLAVIDELMQALNFNSETVPQKSSLEEPDFYKTKIKLCILLHAFRIRAVTIDRVMSYLNASDKKDYNPSLKSRLTISKDTSANQVVLKVTNMDPADTATYYCARSMITNWYFDVWGAGTTVTVSSASTKGPSVFPLAPSSKSTSGGTAALGCLVKDYFPEPVTVSWNSGALTSGVHTFPAVLQSSGLYSLSSVVTVPSSSLGTQTYICNVNHKPSNTKVDKRVEPKSCDKTHTCPPCPAPELLGGPSVFLFPPKPKDTLMISRTPEVTCVVVAVSHEDPEVKFNWYVDGVEVHNAKTKPREEQYNSTYRVVSVLTVLHQDWLNGKEYKCKVSNKALAAPIEKTISKAKGQPREPQVYTLPPSREEMTKNQVSLTCLVKGFYPSDIAVEWESNGQPENNYKTTPPVLDSDGSFFLYSKLTVDKSRWQQGNVFSCSVMHEALHNHYTQKSLSLSPGK

SEQ ID NO: 601 - protein, 10 aa, Artificial Sequence
  source: /note="Description of Artificial Sequence: Synthetic peptide"
KAQLSVGYMH

SEQ ID NO: 602 - protein, 7 aa, Artificial Sequence
  source: /note="Description of Artificial Sequence: Synthetic peptide"
DTSKLAS

SEQ ID NO: 603 - protein, 9 aa, Artificial Sequence
  source: /note="Description of Artificial Sequence: Synthetic peptide"
FQGSGYPFT

SEQ ID NO: 604 - protein, 6 aa, Artificial Sequence
  source: /note="Description of Artificial Sequence: Synthetic peptide"
QLSVGY

SEQ ID NO: 605 - protein, 3 aa, Artificial Sequence
  source: /note="Description of Artificial Sequence: Synthetic peptide"
DTS

SEQ ID NO: 606 - protein, 6 aa, Artificial Sequence
  source: /note="Description of Artificial Sequence: Synthetic peptide"
GSGYPF

SEQ ID NO: 607 - protein, 106 aa, Artificial Sequence; identical to SEQ ID NO: 15
  source: /note="Description of Artificial Sequence: Synthetic polypeptide"

SEQ ID NO: 608 - protein, 213 aa, Artificial Sequence; identical to SEQ ID NO: 16
  source: /note="Description of Artificial Sequence: Synthetic polypeptide"

SEQ ID NO: 609 - protein, 7 aa, Artificial Sequence
  source: /note="Description of Artificial Sequence: Synthetic peptide"
TSGMSVG

SEQ ID NO: 610 - protein, 16 aa, Artificial Sequence
  source: /note="Description of Artificial Sequence: Synthetic peptide"
DIWWDDKKDYNPSLKS

SEQ ID NO: 611 - protein, 206 aa, Artificial Sequence
  source: /note="Description of Artificial Sequence: Synthetic polypeptide"
SMITNLPVATPDPGMFPCLHHSQNLLRAVSNMLQKARQTLEFYPCTSEEIDHEDITKDKTSTVEACLPLELTKNESCLNSRETSFITNGSCLASRKTSFMMALCLSSIYEDLKMYQVEFKTMNAKLLMDPKRQIFLDQNMLAVIDELMQALNFNSETVPQKSSLEEPDFYKTKIKLCILLHAFRIRAVTIDRVMSYLNASNWYFDV

SEQ ID NO: 612 - protein, 9 aa, Artificial Sequence
  source: /note="Description of Artificial Sequence: Synthetic peptide"
GFSLSTSGM

SEQ ID NO: 613 - protein, 5 aa, Artificial Sequence
  source: /note="Description of Artificial Sequence: Synthetic peptide"
WWDDK

SEQ ID NO: 614 - protein, 206 aa, Artificial Sequence; identical to SEQ ID NO: 611
  source: /note="Description of Artificial Sequence: Synthetic polypeptide"

SEQ ID NO: 615 - protein, 316 aa, Artificial Sequence
  source: /note="Description of Artificial Sequence: Synthetic polypeptide"
QVTLRESGPALVKPTQTLTLTCTFSGFSLSTSGMSVGWIRQPPGKALEWLADIWWDDKKDYNPSLKSRLTISKDTSKNQVVLKVTNMDPADTATYYCARSMITNLPVATPDPGMFPCLHHSQNLLRAVSNMLQKARQTLEFYPCTSEEIDHEDITKDKTSTVEACLPLELTKNESCLNSRETSFITNGSCLASRKTSFMMALCLSSIYEDLKMYQVEFKTMNAKLLMDPKRQIFLDQNMLAVIDELMQALNFNSETVPQKSSLEEPDFYKTKIKLCILLHAFRIRAVTIDRVMSYLNASNWYFDVWGAGTTVTVSS

SEQ ID NO: 616 - protein, 646 aa, Artificial Sequence
  source: /note="Description of Artificial Sequence: Synthetic polypeptide"
QVTLRESGPALVKPTQTLTLTCTFSGFSLSTSGMSVGWIRQPPGKALEWLADIWWDDKKDYNPSLKSRLTISKDTSKNQVVLKVTNMDPADTATYYCARSMITNLPVATPDPGMFPCLHHSQNLLRAVSNMLQKARQTLEFYPCTSEEIDHEDITKDKTSTVEACLPLELTKNESCLNSRETSFITNGSCLASRKTSFMMALCLSSIYEDLKMYQVEFKTMNAKLLMDPKRQIFLDQNMLAVIDELMQALNFNSETVPQKSSLEEPDFYKTKIKLCILLHAFRIRAVTIDRVMSYLNASNWYFDVWGAGTTVTVSSASTKGPSVFPLAPSSKSTSGGTAALGCLVKDYFPEPVTVSWNSGALTSGVHTFPAVLQSSGLYSLSSVVTVPSSSLGTQTYICNVNHKPSNTKVDKRVEPKSCDKTHTCPPCPAPELLGGPSVFLFPPKPKDTLMISRTPEVTCVVVAVSHEDPEVKFNWYVDGVEVHNAKTKPREEQYNSTYRVVSVLTVLHQDWLNGKEYKCKVSNKALAAPIEKTISKAKGQPREPQVYTLPPSREEMTKNQVSLTCLVKGFYPSDIAVEWESNGQPENNYKTTPPVLDSDGSFFLYSKLTVDKSRWQQGNVFSCSVMHEALHNHYTQKSLSLSPGK

SEQ ID NO: 617 - protein, 10 aa, Artificial Sequence
  source: /note="Description of Artificial Sequence: Synthetic peptide"
KAQLSVGYMH

SEQ ID NO: 618 - protein, 7 aa, Artificial Sequence
  source: /note="Description of Artificial Sequence: Synthetic peptide"
DTSKLAS

SEQ ID NO: 619 - protein, 9 aa, Artificial Sequence
  source: /note="Description of Artificial Sequence: Synthetic peptide"
FQGSGYPFT

SEQ ID NO: 620 - protein, 6 aa, Artificial Sequence
  source: /note="Description of Artificial Sequence: Synthetic peptide"
QLSVGY

SEQ ID NO: 621 - protein, 3 aa, Artificial Sequence
  source: /note="Description of Artificial Sequence: Synthetic peptide"
DTS

SEQ ID NO: 622 - protein, 6 aa, Artificial Sequence
  source: /note="Description of Artificial Sequence: Synthetic peptide"
GSGYPF

SEQ ID NO: 623 - protein, 106 aa, Artificial Sequence; identical to SEQ ID NO: 15
  source: /note="Description of Artificial Sequence: Synthetic polypeptide"

SEQ ID NO: 624 - protein, 213 aa, Artificial Sequence; identical to SEQ ID NO: 16
  source: /note="Description of Artificial Sequence: Synthetic polypeptide"

SEQ ID NO: 625 - protein, 7 aa, Artificial Sequence
  source: /note="Description of Artificial Sequence: Synthetic peptide"
TSGMSVG

SEQ ID NO: 626 - protein, 15 aa, Artificial Sequence
  source: /note="Description of Artificial Sequence: Synthetic peptide"
DIWWDDKKDYNPSLK

SEQ ID NO: 627 - protein, 10 aa, Artificial Sequence
  source: /note="Description of Artificial Sequence: Synthetic peptide"
SMITNWYFDV

SEQ ID NO: 628 - protein, 9 aa, Artificial Sequence
  source: /note="Description of Artificial Sequence: Synthetic peptide"
GFSLSTSGM

SEQ ID NO: 629 - protein, 5 aa, Artificial Sequence
  source: /note="Description of Artificial Sequence: Synthetic peptide"
WWDDK

SEQ ID NO: 630 - protein, 10 aa, Artificial Sequence
  source: /note="Description of Artificial Sequence: Synthetic peptide"
SMITNWYFDV

SEQ ID NO: 631 - protein, 120 aa, Artificial Sequence; identical to SEQ ID NO: 55
  source: /note="Description of Artificial Sequence: Synthetic polypeptide"

SEQ ID NO: 632 - protein, 450 aa, Artificial Sequence; identical to SEQ ID NO: 56
  source: /note="Description of Artificial Sequence: Synthetic polypeptide"

SEQ ID NO: 633 - protein, 206 aa, Artificial Sequence
  source: /note="Description of Artificial Sequence: Synthetic polypeptide"
KAQLSNLPVATPDPGMFPCLHHSQNLLRAVSNMLQKARQTLEFYPCTSEEIDHEDITKDKTSTVEACLPLELTKNESCLNSRETSFITNGSCLASRKTSFMMALCLSSIYEDLKMYQVEFKTMNAKLLMDPKRQIFLDQNMLAVIDELMQALNFNSETVPQKSSLEEPDFYKTKIKLCILLHAFRIRAVTIDRVMSYLNASVGYMH

SEQ ID NO: 634 - protein, 7 aa, Artificial Sequence
  source: /note="Description of Artificial Sequence: Synthetic peptide"
DTSKLAS

SEQ ID NO: 635 - protein, 9 aa, Artificial Sequence
  source: /note="Description of Artificial Sequence: Synthetic peptide"
FQGSGYPFT

SEQ ID NO: 636 - protein, 202 aa, Artificial Sequence
  source: /note="Description of Artificial Sequence: Synthetic polypeptide"
QLSNLPVATPDPGMFPCLHHSQNLLRAVSNMLQKARQTLEFYPCTSEEIDHEDITKDKTSTVEACLPLELTKNESCLNSRETSFITNGSCLASRKTSFMMALCLSSIYEDLKMYQVEFKTMNAKLLMDPKRQIFLDQNMLAVIDELMQALNFNSETVPQKSSLEEPDFYKTKIKLCILLHAFRIRAVTIDRVMSYLNASVGY

SEQ ID NO: 637 - protein, 3 aa, Artificial Sequence
  source: /note="Description of Artificial Sequence: Synthetic peptide"
DTS

SEQ ID NO: 638 - protein, 6 aa, Artificial Sequence
  source: /note="Description of Artificial Sequence: Synthetic peptide"
GSGYPF

SEQ ID NO: 639 - protein, 302 aa, Artificial Sequence
  source: /note="Description of Artificial Sequence: Synthetic polypeptide"
DIQMTQSPSTLSASVGDRVTITCKAQLSNLPVATPDPGMFPCLHHSQNLLRAVSNMLQKARQTLEFYPCTSEEIDHEDITKDKTSTVEACLPLELTKNESCLNSRETSFITNGSCLASRKTSFMMALCLSSIYEDLKMYQVEFKTMNAKLLMDPKRQIFLDQNMLAVIDELMQALNFNSETVPQKSSLEEPDFYKTKIKLCILLHAFRIRAVTIDRVMSYLNASVGYMHWYQQKPGKAPKLLIYDTSKLASGVPSRFSGSGSGTEFTLTISSLQPDDFATYYCFQGSGYPFTFGGGTKLEIK

SEQ ID NO: 640 - protein, 409 aa, Artificial Sequence
  source: /note="Description of Artificial Sequence: Synthetic polypeptide"
DIQMTQSPSTLSASVGDRVTITCKAQLSNLPVATPDPGMFPCLHHSQNLLRAVSNMLQKARQTLEFYPCTSEEIDHEDITKDKTSTVEACLPLELTKNESCLNSRETSFITNGSCLASRKTSFMMALCLSSIYEDLKMYQVEFKTMNAKLLMDPKRQIFLDQNMLAVIDELMQALNFNSETVPQKSSLEEPDFYKTKIKLCILLHAFRIRAVTIDRVMSYLNASVGYMHWYQQKPGKAPKLLIYDTSKLASGVPSRFSGSGSGTEFTLTISSLQPDDFATYYCFQGSGYPFTFGGGTKLEIKRTVAAPSVFIFPPSDEQLKSGTASVVCLLNNFYPREAKVQWKVDNALQSGNSQESVTEQDSKDSTYSLSSTLTLSKADYEKHKVYACEVTHQGLSSPVTKSFNRGEC

SEQ ID NO: 641 - protein, 7 aa, Artificial Sequence
  source: /note="Description of Artificial Sequence: Synthetic peptide"
TSGMSVG

SEQ ID NO: 642 - protein, 15 aa, Artificial Sequence
  source: /note="Description of Artificial Sequence: Synthetic peptide"
DIWWDDKKDYNPSLK

SEQ ID NO: 643 - protein, 10 aa, Artificial Sequence
  source: /note="Description of Artificial Sequence: Synthetic peptide"
SMITNWYFDV

SEQ ID NO: 644 - protein, 9 aa, Artificial Sequence
  source: /note="Description of Artificial Sequence: Synthetic peptide"
GFSLSTSGM

SEQ ID NO: 645 - protein, 5 aa, Artificial Sequence
  source: /note="Description of Artificial Sequence: Synthetic peptide"
WWDDK

SEQ ID NO: 646 - protein, 10 aa, Artificial Sequence
  source: /note="Description of Artificial Sequence: Synthetic peptide"
SMITNWYFDV

SEQ ID NO: 647 - protein, 120 aa, Artificial Sequence; identical to SEQ ID NO: 55
  source: /note="Description of Artificial Sequence: Synthetic polypeptide"

SEQ ID NO: 648 - protein, 450 aa, Artificial Sequence; identical to SEQ ID NO: 56
  source: /note="Description of Artificial Sequence: Synthetic polypeptide"

SEQ ID NO: 649 - protein, 10 aa, Artificial Sequence
  source: /note="Description of Artificial Sequence: Synthetic peptide"
KAQLSVGYMH

SEQ ID NO: 650 - protein, 203 aa, Artificial Sequence
  source: /note="Description of Artificial Sequence: Synthetic polypeptide"
DTNLPVATPDPGMFPCLHHSQNLLRAVSNMLQKARQTLEFYPCTSEEIDHEDITKDKTSTVEACLPLELTKNESCLNSRETSFITNGSCLASRKTSFMMALCLSSIYEDLKMYQVEFKTMNAKLLMDPKRQIFLDQNMLAVIDELMQALNFNSETVPQKSSLEEPDFYKTKIKLCILLHAFRIRAVTIDRVMSYLNASSKLAS

SEQ ID NO: 651 - protein, 9 aa, Artificial Sequence
  source: /note="Description of Artificial Sequence: Synthetic peptide"
FQGSGYPFT

SEQ ID NO: 652 - protein, 6 aa, Artificial Sequence
  source: /note="Description of Artificial Sequence: Synthetic peptide"
QLSVGY

SEQ ID NO: 653 - protein, 199 aa, Artificial Sequence
  source: /note="Description of Artificial Sequence: Synthetic polypeptide"
DTNLPVATPDPGMFPCLHHSQNLLRAVSNMLQKARQTLEFYPCTSEEIDHEDITKDKTSTVEACLPLELTKNESCLNSRETSFITNGSCLASRKTSFMMALCLSSIYEDLKMYQVEFKTMNAKLLMDPKRQIFLDQNMLAVIDELMQALNFNSETVPQKSSLEEPDFYKTKIKLCILLHAFRIRAVTIDRVMSYLNASS

SEQ ID NO: 654 - protein, 6 aa, Artificial Sequence
  source: /note="Description of Artificial Sequence: Synthetic peptide"
GSGYPF

SEQ ID NO: 655 - protein, 302 aa, Artificial Sequence
  source: /note="Description of Artificial Sequence: Synthetic polypeptide"
DIQMTQSPSTLSASVGDRVTITCKAQLSVGYMHWYQQKPGKAPKLLIYDTNLPVATPDPGMFPCLHHSQNLLRAVSNMLQKARQTLEFYPCTSEEIDHEDITKDKTSTVEACLPLELTKNESCLNSRETSFITNGSCLASRKTSFMMALCLSSIYEDLKMYQVEFKTMNAKLLMDPKRQIFLDQNMLAVIDELMQALNFNSETVPQKSSLEEPDFYKTKIKLCILLHAFRIRAVTIDRVMSYLNASSKLASGVPSRFSGSGSGTEFTLTISSLQPDDFATYYCFQGSGYPFTFGGGTKLEIK

SEQ ID NO: 656 - protein, 409 aa, Artificial Sequence
  source: /note="Description of Artificial Sequence: Synthetic polypeptide"
DIQMTQSPSTLSASVGDRVTITCKAQLSVGYMHWYQQKPGKAPKLLIYDTNLPVATPDPGMFPCLHHSQNLLRAVSNMLQKARQTLEFYPCTSEEIDHEDITKDKTSTVEACLPLELTKNESCLNSRETSFITNGSCLASRKTSFMMALCLSSIYEDLKMYQVEFKTMNAKLLMDPKRQIFLDQNMLAVIDELMQALNFNSETVPQKSSLEEPDFYKTKIKLCILLHAFRIRAVTIDRVMSYLNASSKLASGVPSRFSGSGSGTEFTLTISSLQPDDFATYYCFQGSGYPFTFGGGTKLEIKRTVAAPSVFIFPPSDEQLKSGTASVVCLLNNFYPREAKVQWKVDNALQSGNSQESVTEQDSKDSTYSLSSTLTLSKADYEKHKVYACEVTHQGLSSPVTKSFNRGEC

SEQ ID NO: 657 - protein, 7 aa, Artificial Sequence
  source: /note="Description of Artificial Sequence: Synthetic peptide"
TSGMSVG

SEQ ID NO: 658 - protein, 15 aa, Artificial Sequence
  source: /note="Description of Artificial Sequence: Synthetic peptide"
DIWWDDKKDYNPSLK

SEQ ID NO: 659 - protein, 10 aa, Artificial Sequence
  source: /note="Description of Artificial Sequence: Synthetic peptide"
SMITNWYFDV

SEQ ID NO: 660 - protein, 9 aa, Artificial Sequence
  source: /note="Description of Artificial Sequence: Synthetic peptide"
GFSLSTSGM

SEQ ID NO: 661 - protein, 5 aa, Artificial Sequence
  source: /note="Description of Artificial Sequence: Synthetic peptide"
WWDDK

SEQ ID NO: 662 - protein, 10 aa, Artificial Sequence
  source: /note="Description of Artificial Sequence: Synthetic peptide"
SMITNWYFDV

SEQ ID NO: 663 - protein, 120 aa, Artificial Sequence; identical to SEQ ID NO: 55
  source: /note="Description of Artificial Sequence: Synthetic polypeptide"

SEQ ID NO: 664 - protein, 450 aa, Artificial Sequence; identical to SEQ ID NO: 56
  source: /note="Description of Artificial Sequence: Synthetic polypeptide"

SEQ ID NO: 665 - protein, 10 aa, Artificial Sequence
  source: /note="Description of Artificial Sequence: Synthetic peptide"
KAQLSVGYMH

SEQ ID NO: 666 - protein, 7 aa, Artificial Sequence
  source: /note="Description of Artificial Sequence: Synthetic peptide"
DTSKLAS

SEQ ID NO: 667 - protein, 205 aa, Artificial Sequence
  source: /note="Description of Artificial Sequence: Synthetic polypeptide"
FQGSGNLPVATPDPGMFPCLHHSQNLLRAVSNMLQKARQTLEFYPCTSEEIDHEDITKDKTSTVEACLPLELTKNESCLNSRETSFITNGSCLASRKTSFMMALCLSSIYEDLKMYQVEFKTMNAKLLMDPKRQIFLDQNMLAVIDELMQALNFNSETVPQKSSLEEPDFYKTKIKLCILLHAFRIRAVTIDRVMSYLNASYPFT

SEQ ID NO: 668 - protein, 6 aa, Artificial Sequence
  source: /note="Description of Artificial Sequence: Synthetic peptide"
QLSVGY

SEQ ID NO: 669 - protein, 3 aa, Artificial Sequence
  source: /note="Description of Artificial Sequence: Synthetic peptide"
DTS

SEQ ID NO: 670 - protein, 202 aa, Artificial Sequence
  source: /note="Description of Artificial Sequence: Synthetic polypeptide"
GSGNLPVATPDPGMFPCLHHSQNLLRAVSNMLQKARQTLEFYPCTSEEIDHEDITKDKTSTVEACLPLELTKNESCLNSRETSFITNGSCLASRKTSFMMALCLSSIYEDLKMYQVEFKTMNAKLLMDPKRQIFLDQNMLAVIDELMQALNFNSETVPQKSSLEEPDFYKTKIKLCILLHAFRIRAVTIDRVMSYLNASYPF

SEQ ID NO: 671 - protein, 302 aa, Artificial Sequence
  source: /note="Description of Artificial Sequence: Synthetic polypeptide"
DIQMTQSPSTLSASVGDRVTITCKAQLSVGYMHWYQQKPGKAPKLLIYDTSKLASGVPSRFSGSGSGTEFTLTISSLQPDDFATYYCFQGSGNLPVATPDPGMFPCLHHSQNLLRAVSNMLQKARQTLEFYPCTSEEIDHEDITKDKTSTVEACLPLELTKNESCLNSRETSFITNGSCLASRKTSFMMALCLSSIYEDLKMYQVEFKTMNAKLLMDPKRQIFLDQNMLAVIDELMQALNFNSETVPQKSSLEEPDFYKTKIKLCILLHAFRIRAVTIDRVMSYLNASYPFTFGGGTKLEIK

SEQ ID NO: 672 - protein, 409 aa, Artificial Sequence
  source: /note="Description of Artificial Sequence: Synthetic polypeptide"
DIQMTQSPSTLSASVGDRVTITCKAQLSVGYMHWYQQKPGKAPKLLIYDTSKLASGVPSRFSGSGSGTEFTLTISSLQPDDFATYYCFQGSGNLPVATPDPGMFPCLHHSQNLLRAVSNMLQKARQTLEFYPCTSEEIDHEDITKDKTSTVEACLPLELTKNESCLNSRETSFITNGSCLASRKTSFMMALCLSSIYEDLKMYQVEFKTMNAKLLMDPKRQIFLDQNMLAVIDELMQALNFNSETVPQKSSLEEPDFYKTKIKLCILLHAFRIRAVTIDRVMSYLNASYPFTFGGGTKLEIKRTVAAPSVFIFPPSDEQLKSGTASVVCLLNNFYPREAKVQWKVDNALQSGNSQESVTEQDSKDSTYSLSSTLTLSKADYEKHKVYACEVTHQGLSSPVTKSFNRGEC

SEQ ID NO: 673 - protein, 129 aa, Artificial Sequence
  source: /note="Description of Artificial Sequence: Synthetic polypeptide"
TCLGGFASPGPVPPSTALRELIEELVNITQNQKAPLCNGSMVWSINLTAGMYCAALESLINVSGCSAIEKTQRMLSGFCPHKVSAGQFSSLHVRDTKIEVAQFVKDLLLHLKKLFREGQFNSTSGMSVG

SEQ ID NO: 674 - protein, 16 aa, Artificial Sequence
  source: /note="Description of Artificial Sequence: Synthetic peptide"
DIWWDDKKDYNPSLKS

SEQ ID NO: 675 - protein, 10 aa, Artificial Sequence
  source: /note="Description of Artificial Sequence: Synthetic peptide"
SMITNWYFDV

SEQ ID NO: 676 - protein, 131 aa, Artificial Sequence
  source: /note="Description of Artificial Sequence: Synthetic polypeptide"
GFSLLTCLGGFASPGPVPPSTALRELIEELVNITQNQKAPLCNGSMVWSINLTAGMYCAALESLINVSGCSAIEKTQRMLSGFCPHKVSAGQFSSLHVRDTKIEVAQFVKDLLLHLKKLFREGQFNSTSGM

SEQ ID NO: 677 - protein, 5 aa, Artificial Sequence
  source: /note="Description of Artificial Sequence: Synthetic peptide"
WWDDK

SEQ ID NO: 678 - protein, 10 aa, Artificial Sequence
  source: /note="Description of Artificial Sequence: Synthetic peptide"
SMITNWYFDV

SEQ ID NO: 679 - protein, 242 aa, Artificial Sequence
  source: /note="Description of Artificial Sequence: Synthetic polypeptide"
QVTLRESGPALVKPTQTLTLTCTFSGFSLLTCLGGFASPGPVPPSTALRELIEELVNITQNQKAPLCNGSMVWSINLTAGMYCAALESLINVSGCSAIEKTQRMLSGFCPHKVSAGQFSSLHVRDTKIEVAQFVKDLLLHLKKLFREGQFNSTSGMSVGWIRQPPGKALEWLADIWWDDKKDYNPSLKSRLTISKDTSKNQVVLKVTNMDPADTATYYCARSMITNWYFDVWGAGTTVTVSS

SEQ ID NO: 680 - protein, 572 aa, Artificial Sequence
  source: /note="Description of Artificial Sequence: Synthetic polypeptide"
QVTLRESGPALVKPTQTLTLTCTFSGFSLLTCLGGFASPGPVPPSTALRELIEELVNITQNQKAPLCNGSMVWSINLTAGMYCAALESLINVSGCSAIEKTQRMLSGFCPHKVSAGQFSSLHVRDTKIEVAQFVKDLLLHLKKLFREGQFNSTSGMSVGWIRQPPGKALEWLADIWWDDKKDYNPSLKSRLTISKDTSKNQVVLKVTNMDPADTATYYCARSMITNWYFDVWGAGTTVTVSSASTKGPSVFPLAPSSKSTSGGTAALGCLVKDYFPEPVTVSWNSGALTSGVHTFPAVLQSSGLYSLSSVVTVPSSSLGTQTYICNVNHKPSNTKVDKRVEPKSCDKTHTCPPCPAPELLGGPSVFLFPPKPKDTLMISRTPEVTCVVVAVSHEDPEVKFNWYVDGVEVHNAKTKPREEQYNSTYRVVSVLTVLHQDWLNGKEYKCKVSNKALAAPIEKTISKAKGQPREPQVYTLPPSREEMTKNQVSLTCLVKGFYPSDIAVEWESNGQPENNYKTTPPVLDSDGSFFLYSKLTVDKSRWQQGNVFSCSVMHEALHNHYTQKSLSLSPGK

SEQ ID NO: 681 - protein, 10 aa, Artificial Sequence
  source: /note="Description of Artificial Sequence: Synthetic peptide"
KAQLSVGYMH

SEQ ID NO: 682 - protein, 7 aa, Artificial Sequence
  source: /note="Description of Artificial Sequence: Synthetic peptide"
DTSKLAS

SEQ ID NO: 683 - protein, 9 aa, Artificial Sequence
  source: /note="Description of Artificial Sequence: Synthetic peptide"
FQGSGYPFT

SEQ ID NO: 684 - protein, 6 aa, Artificial Sequence
  source: /note="Description of Artificial Sequence: Synthetic peptide"
QLSVGY

SEQ ID NO: 685 - protein, 3 aa, Artificial Sequence
  source: /note="Description of Artificial Sequence: Synthetic peptide"
DTS

SEQ ID NO: 686 - protein, 6 aa, Artificial Sequence
  source: /note="Description of Artificial Sequence: Synthetic peptide"
GSGYPF

SEQ ID NO: 687 - protein, 106 aa, Artificial Sequence; identical to SEQ ID NO: 15
  source: /note="Description of Artificial Sequence: Synthetic polypeptide"

SEQ ID NO: 688 - protein, 213 aa, Artificial Sequence; identical to SEQ ID NO: 16
  source: /note="Description of Artificial Sequence: Synthetic polypeptide"

SEQ ID NO: 689 - protein, 7 aa, Artificial Sequence
  source: /note="Description of Artificial Sequence: Synthetic peptide"
TSGMSVG

SEQ ID NO: 690 - protein, 138 aa, Artificial Sequence
  source: /note="Description of Artificial Sequence: Synthetic polypeptide"
DIWWDLTCLGGFASPGPVPPSTALRELIEELVNITQNQKAPLCNGSMVWSINLTAGMYCAALESLINVSGCSAIEKTQRMLSGFCPHKVSAGQFSSLHVRDTKIEVAQFVKDLLLHLKKLFREGQFNDKKDYNPSLKS

SEQ ID NO: 691 - protein, 10 aa, Artificial Sequence
  source: /note="Description of Artificial Sequence: Synthetic peptide"
SMITNWYFDV

SEQ ID NO: 692 - protein, 9 aa, Artificial Sequence
  source: /note="Description of Artificial Sequence: Synthetic peptide"
GFSLSTSGM

SEQ ID NO: 693 - protein, 127 aa, Artificial Sequence
  source: /note="Description of Artificial Sequence: Synthetic polypeptide"
WWDLTCLGGFASPGPVPPSTALRELIEELVNITQNQKAPLCNGSMVWSINLTAGMYCAALESLINVSGCSAIEKTQRMLSGFCPHKVSAGQFSSLHVRDTKIEVAQFVKDLLLHLKKLFREGQFNDK

SEQ ID NO: 694 - protein, 10 aa, Artificial Sequence
  source: /note="Description of Artificial Sequence: Synthetic peptide"
SMITNWYFDV

SEQ ID NO: 695 - protein, 242 aa, Artificial Sequence
  source: /note="Description of Artificial Sequence: Synthetic polypeptide"
QVTLRESGPALVKPTQTLTLTCTFSGFSLSTSGMSVGWIRQPPGKALEWLADIWWDLTCLGGFASPGPVPPSTALRELIEELVNITQNQKAPLCNGSMVWSINLTAGMYCAALESLINVSGCSAIEKTQRMLSGFCPHKVSAGQFSSLHVRDTKIEVAQFVKDLLLHLKKLFREGQFNDKKDYNPSLKSRLTISKDTSKNQVVLKVTNMDPADTATYYCARSMITNWYFDVWGAGTTVTVSS

SEQ ID NO: 696 - protein, 572 aa, Artificial Sequence
  source: /note="Description of Artificial Sequence: Synthetic polypeptide"
QVTLRESGPALVKPTQTLTLTCTFSGFSLSTSGMSVGWIRQPPGKALEWLADIWWDLTCLGGFASPGPVPPSTALRELIEELVNITQNQKAPLCNGSMVWSINLTAGMYCAALESLINVSGCSAIEKTQRMLSGFCPHKVSAGQFSSLHVRDTKIEVAQFVKDLLLHLKKLFREGQFNDKKDYNPSLKSRLTISKDTSKNQVVLKVTNMDPADTATYYCARSMITNWYFDVWGAGTTVTVSSASTKGPSVFPLAPSSKSTSGGTAALGCLVKDYFPEPVTVSWNSGALTSGVHTFPAVLQSSGLYSLSSVVTVPSSSLGTQTYICNVNHKPSNTKVDKRVEPKSCDKTHTCPPCPAPELLGGPSVFLFPPKPKDTLMISRTPEVTCVVVAVSHEDPEVKFNWYVDGVEVHNAKTKPREEQYNSTYRVVSVLTVLHQDWLNGKEYKCKVSNKALAAPIEKTISKAKGQPREPQVYTLPPSREEMTKNQVSLTCLVKGFYPSDIAVEWESNGQPENNYKTTPPVLDSDGSFFLYSKLTVDKSRWQQGNVFSCSVMHEALHNHYTQKSLSLSPGK

SEQ ID NO: 697 - protein, 10 aa, Artificial Sequence
  source: /note="Description of Artificial Sequence: Synthetic peptide"
KAQLSVGYMH

SEQ ID NO: 698 - protein, 7 aa, Artificial Sequence
  source: /note="Description of Artificial Sequence: Synthetic peptide"
DTSKLAS

SEQ ID NO: 699 - protein, 9 aa, Artificial Sequence
  source: /note="Description of Artificial Sequence: Synthetic peptide"
FQGSGYPFT

SEQ ID NO: 700 - protein, 6 aa, Artificial Sequence
  source: /note="Description of Artificial Sequence: Synthetic peptide"
QLSVGY

SEQ ID NO: 701 - protein, 3 aa, Artificial Sequence
  source: /note="Description of Artificial Sequence: Synthetic peptide"
DTS

SEQ ID NO: 702 - protein, 6 aa, Artificial Sequence
  source: /note="Description of Artificial Sequence: Synthetic peptide"
GSGYPF

SEQ ID NO: 703 - protein, 106 aa, Artificial Sequence; identical to SEQ ID NO: 15
  source: /note="Description of Artificial Sequence: Synthetic polypeptide"

SEQ ID NO: 704 - protein, 213 aa, Artificial Sequence; identical to SEQ ID NO: 16
  source: /note="Description of Artificial Sequence: Synthetic polypeptide"

SEQ ID NO: 705 - protein, 7 aa, Artificial Sequence
  source: /note="Description of Artificial Sequence: Synthetic peptide"
TSGMSVG

SEQ ID NO: 706 - protein, 16 aa, Artificial Sequence
  source: /note="Description of Artificial Sequence: Synthetic peptide"
DIWWDDKKDYNPSLKS

SEQ ID NO: 707 - protein, 132 aa, Artificial Sequence
  source: /note="Description of Artificial Sequence: Synthetic polypeptide"
SMITLTCLGGFASPGPVPPSTALRELIEELVNITQNQKAPLCNGSMVWSINLTAGMYCAALESLINVSGCSAIEKTQRMLSGFCPHKVSAGQFSSLHVRDTKIEVAQFVKDLLLHLKKLFREGQFNNWYFDV

SEQ ID NO: 708 - protein, 9 aa, Artificial Sequence
  source: /note="Description of Artificial Sequence: Synthetic peptide"
GFSLSTSGM

SEQ ID NO: 709 - protein, 5 aa, Artificial Sequence
  source: /note="Description of Artificial Sequence: Synthetic peptide"
WWDDK

SEQ ID NO: 710 - protein, 132 aa, Artificial Sequence; identical to SEQ ID NO: 707
  source: /note="Description of Artificial Sequence: Synthetic polypeptide"

SEQ ID NO: 711 - protein, 242 aa, Artificial Sequence
  source: /note="Description of Artificial Sequence: Synthetic polypeptide"
QVTLRESGPALVKPTQTLTLTCTFSGFSLSTSGMSVGWIRQPPGKALEWLADIWWDDKKDYNPSLKSRLTISKDTSKNQVVLKVTNMDPADTATYYCARSMITLTCLGGFASPGPVPPSTALRELIEELVNITQNQKAPLCNGSMVWSINLTAGMYCAALESLINVSGCSAIEKTQRMLSGFCPHKVSAGQFSSLHVRDTKIEVAQFVKDLLLHLKKLFREGQFNNWYFDVWGAGTTVTVSS

SEQ ID NO: 712 - protein, 572 aa, Artificial Sequence
  source: /note="Description of Artificial Sequence: Synthetic polypeptide"
QVTLRESGPALVKPTQTLTLTCTFSGFSLSTSGMSVGWIRQPPGKALEWLADIWWDDKKDYNPSLKSRLTISKDTSKNQVVLKVTNMDPADTATYYCARSMITLTCLGGFASPGPVPPSTALRELIEELVNITQNQKAPLCNGSMVWSINLTAGMYCAALESLINVSGCSAIEKTQRMLSGFCPHKVSAGQFSSLHVRDTKIEVAQFVKDLLLHLKKLFREGQFNNWYFDVWGAGTTVTVSSASTKGPSVFPLAPSSKSTSGGTAALGCLVKDYFPEPVTVSWNSGALTSGVHTFPAVLQSSGLYSLSSVVTVPSSSLGTQTYICNVNHKPSNTKVDKRVEPKSCDKTHTCPPCPAPELLGGPSVFLFPPKPKDTLMISRTPEVTCVVVAVSHEDPEVKFNWYVDGVEVHNAKTKPREEQYNSTYRVVSVLTVLHQDWLNGKEYKCKVSNKALAAPIEKTISKAKGQPREPQVYTLPPSREEMTKNQVSLTCLVKGFYPSDIAVEWESNGQPENNYKTTPPVLDSDGSFFLYSKLTVDKSRWQQGNVFSCSVMHEALHNHYTQKSLSLSPGK

SEQ ID NO: 713 - protein, 10 aa, Artificial Sequence
  source: /note="Description of Artificial Sequence: Synthetic peptide"
KAQLSVGYMH

SEQ ID NO: 714 - protein, 7 aa, Artificial Sequence
  source: /note="Description of Artificial Sequence: Synthetic peptide"
DTSKLAS

SEQ ID NO: 715 - protein, 9 aa, Artificial Sequence
  source: /note="Description of Artificial Sequence: Synthetic peptide"
FQGSGYPFT

SEQ ID NO: 716 - protein, 6 aa, Artificial Sequence
  source: /note="Description of Artificial Sequence: Synthetic peptide"
QLSVGY

SEQ ID NO: 717 - protein, 3 aa, Artificial Sequence
  source: /note="Description of Artificial Sequence: Synthetic peptide"
DTS

SEQ ID NO: 718 - protein, 6 aa, Artificial Sequence
  source: /note="Description of Artificial Sequence: Synthetic peptide"
GSGYPF

SEQ ID NO: 719 - protein, 106 aa, Artificial Sequence; identical to SEQ ID NO: 15
  source: /note="Description of Artificial Sequence: Synthetic polypeptide"

SEQ ID NO: 720 - protein, 213 aa, Artificial Sequence; identical to SEQ ID NO: 16
  source: /note="Description of Artificial Sequence: Synthetic polypeptide"

SEQ ID NO: 721 - protein, 7 aa, Artificial Sequence
  source: /note="Description of Artificial Sequence: Synthetic peptide"
TSGMSVG

SEQ ID NO: 722 - protein, 15 aa, Artificial Sequence
  source: /note="Description of Artificial Sequence: Synthetic peptide"
DIWWDDKKDYNPSLK

SEQ ID NO: 723 - protein, 10 aa, Artificial Sequence
  source: /note="Description of Artificial Sequence: Synthetic peptide"
SMITNWYFDV

SEQ ID NO: 724 - protein, 9 aa, Artificial Sequence
  source: /note="Description of Artificial Sequence: Synthetic peptide"
GFSLSTSGM

SEQ ID NO: 725 - protein, 5 aa, Artificial Sequence
  source: /note="Description of Artificial Sequence: Synthetic peptide"
WWDDK

SEQ ID NO: 726 - protein, 10 aa, Artificial Sequence
  source: /note="Description of Artificial Sequence: Synthetic peptide"
SMITNWYFDV

SEQ ID NO: 727 - protein, 120 aa, Artificial Sequence; identical to SEQ ID NO: 55
  source: /note="Description of Artificial Sequence: Synthetic polypeptide"

SEQ ID NO: 728 - protein, 450 aa, Artificial Sequence; identical to SEQ ID NO: 56
  source: /note="Description of Artificial Sequence: Synthetic polypeptide"

SEQ ID NO: 729 - protein, 132 aa, Artificial Sequence
  source: /note="Description of Artificial Sequence: Synthetic polypeptide"
KAQLSLTCLGGFASPGPVPPSTALRELIEELVNITQNQKAPLCNGSMVWSINLTAGMYCAALESLINVSGCSAIEKTQRMLSGFCPHKVSAGQFSSLHVRDTKIEVAQFVKDLLLHLKKLFREGQFNVGYMH

SEQ ID NO: 730 - protein, 7 aa, Artificial Sequence
  source: /note="Description of Artificial Sequence: Synthetic peptide"
DTSKLAS

SEQ ID NO: 731 - protein, 9 aa, Artificial Sequence
  source: /note="Description of Artificial Sequence: Synthetic peptide"
FQGSGYPFT

SEQ ID NO: 732 - protein, 128 aa, Artificial Sequence
  source: /note="Description of Artificial Sequence: Synthetic polypeptide"
QLSLTCLGGFASPGPVPPSTALRELIEELVNITQNQKAPLCNGSMVWSINLTAGMYCAALESLINVSGCSAIEKTQRMLSGFCPHKVSAGQFSSLHVRDTKIEVAQFVKDLLLHLKKLFREGQFNVGY

SEQ ID NO: 733 - protein, 3 aa, Artificial Sequence
  source: /note="Description of Artificial Sequence: Synthetic peptide"
DTS

SEQ ID NO: 734 - protein, 6 aa, Artificial Sequence
  source: /note="Description of Artificial Sequence: Synthetic peptide"
GSGYPF

SEQ ID NO: 735 - protein, 228 aa, Artificial Sequence
  source: /note="Description of Artificial Sequence: Synthetic polypeptide"
DIQMTQSPSTLSASVGDRVTITCKAQLSLTCLGGFASPGPVPPSTALRELIEELVNITQNQKAPLCNGSMVWSINLTAGMYCAALESLINVSGCSAIEKTQRMLSGFCPHKVSAGQFSSLHVRDTKIEVAQFVKDLLLHLKKLFREGQFNVGYMHWYQQKPGKAPKLLIYDTSKLASGVPSRFSGSGSGTEFTLTISSLQPDDFATYYCFQGSGYPFTFGGGTKLEIK

SEQ ID NO: 736 - protein, 335 aa, Artificial Sequence
  source: /note="Description of Artificial Sequence: Synthetic polypeptide"
DIQMTQSPSTLSASVGDRVTITCKAQLSLTCLGGFASPGPVPPSTALRELIEELVNITQNQKAPLCNGSMVWSINLTAGMYCAALESLINVSGCSAIEKTQRMLSGFCPHKVSAGQFSSLHVRDTKIEVAQFVKDLLLHLKKLFREGQFNVGYMHWYQQKPGKAPKLLIYDTSKLASGVPSRFSGSGSGTEFTLTISSLQPDDFATYYCFQGSGYPFTFGGGTKLEIKRTVAAPSVFIFPPSDEQLKSGTASVVCLLNNFYPREAKVQWKVDNALQSGNSQESVTEQDSKDSTYSLSSTLTLSKADYEKHKVYACEVTHQGLSSPVTKSFNRGEC

SEQ ID NO: 737 - protein, 7 aa, Artificial Sequence
  source: /note="Description of Artificial Sequence: Synthetic peptide"
TSGMSVG

SEQ ID NO: 738 - protein, 15 aa, Artificial Sequence
  source: /note="Description of Artificial Sequence: Synthetic peptide"
DIWWDDKKDYNPSLK

SEQ ID NO: 739 - protein, 10 aa, Artificial Sequence
  source: /note="Description of Artificial Sequence: Synthetic peptide"
SMITNWYFDV

SEQ ID NO: 740 - protein, 9 aa, Artificial Sequence
  source: /note="Description of Artificial Sequence: Synthetic peptide"
GFSLSTSGM

SEQ ID NO: 741 - protein, 5 aa, Artificial Sequence
  source: /note="Description of Artificial Sequence: Synthetic peptide"
WWDDK

SEQ ID NO: 742 - protein, 10 aa, Artificial Sequence
  source: /note="Description of Artificial Sequence: Synthetic peptide"
SMITNWYFDV

SEQ ID NO: 743 - protein, 120 aa, Artificial Sequence; identical to SEQ ID NO: 55
  source: /note="Description of Artificial Sequence: Synthetic polypeptide"

SEQ ID NO: 744 - protein, 450 aa, Artificial Sequence; identical to SEQ ID NO: 56
  source: /note="Description of Artificial Sequence: Synthetic polypeptide"

SEQ ID NO: 745 - protein, 10 aa, Artificial Sequence
  source: /note="Description of Artificial Sequence: Synthetic peptide"
KAQLSVGYMH

SEQ ID NO: 746 - protein, 129 aa, Artificial Sequence
  source: /note="Description of Artificial Sequence: Synthetic polypeptide"
DTLTCLGGFASPGPVPPSTALRELIEELVNITQNQKAPLCNGSMVWSINLTAGMYCAALESLINVSGCSAIEKTQRMLSGFCPHKVSAGQFSSLHVRDTKIEVAQFVKDLLLHLKKLFREGQFNSKLAS

SEQ ID NO: 747 - protein, 9 aa, Artificial Sequence
  source: /note="Description of Artificial Sequence: Synthetic peptide"
FQGSGYPFT

SEQ ID NO: 748 - protein, 6 aa, Artificial Sequence
  source: /note="Description of Artificial Sequence: Synthetic peptide"
QLSVGY

SEQ ID NO: 749 - protein, 125 aa, Artificial Sequence
  source: /note="Description of Artificial Sequence: Synthetic polypeptide"
DTLTCLGGFASPGPVPPSTALRELIEELVNITQNQKAPLCNGSMVWSINLTAGMYCAALESLINVSGCSAIEKTQRMLSGFCPHKVSAGQFSSLHVRDTKIEVAQFVKDLLLHLKKLFREGQFNS

SEQ ID NO: 750 - protein, 6 aa, Artificial Sequence
  source: /note="Description of Artificial Sequence: Synthetic peptide"
GSGYPF

SEQ ID NO: 751 - protein, 228 aa, Artificial Sequence
  source: /note="Description of Artificial Sequence: Synthetic polypeptide"
DIQMTQSPSTLSASVGDRVTITCKAQLSVGYMHWYQQKPGKAPKLLIYDTLTCLGGFASPGPVPPSTALRELIEELVNITQNQKAPLCNGSMVWSINLTAGMYCAALESLINVSGCSAIEKTQRMLSGFCPHKVSAGQFSSLHVRDTKIEVAQFVKDLLLHLKKLFREGQFNSKLASGVPSRFSGSGSGTEFTLTISSLQPDDFATYYCFQGSGYPFTFGGGTKLEIK

SEQ ID NO: 752 - protein, 335 aa, Artificial Sequence
  source: /note="Description of Artificial Sequence: Synthetic polypeptide"
DIQMTQSPSTLSASVGDRVTITCKAQLSVGYMHWYQQKPGKAPKLLIYDTLTCLGGFASPGPVPPSTALRELIEELVNITQNQKAPLCNGSMVWSINLTAGMYCAALESLINVSGCSAIEKTQRMLSGFCPHKVSAGQFSSLHVRDTKIEVAQFVKDLLLHLKKLFREGQFNSKLASGVPSRFSGSGSGTEFTLTISSLQPDDFATYYCFQGSGYPFTFGGGTKLEIKRTVAAPSVFIFPPSDEQLKSGTASVVCLLNNFYPREAKVQWKVDNALQSGNSQESVTEQDSKDSTYSLSSTLTLSKADYEKHKVYACEVTHQGLSSPVTKSFNRGEC

SEQ ID NO: 753 - protein, 7 aa, Artificial Sequence
  source: /note="Description of Artificial Sequence: Synthetic peptide"
TSGMSVG

SEQ ID NO: 754 - protein, 15 aa, Artificial Sequence
  source: /note="Description of Artificial Sequence: Synthetic peptide"
DIWWDDKKDYNPSLK

SEQ ID NO: 755 - protein, 10 aa, Artificial Sequence
  source: /note="Description of Artificial Sequence: Synthetic peptide"
SMITNWYFDV

SEQ ID NO: 756 - protein, 9 aa, Artificial Sequence
  source: /note="Description of Artificial Sequence: Synthetic peptide"
GFSLSTSGM

SEQ ID NO: 757 - protein, 5 aa, Artificial Sequence
  source: /note="Description of Artificial Sequence: Synthetic peptide"
WWDDK

SEQ ID NO: 758 - protein, 10 aa, Artificial Sequence
  source: /note="Description of Artificial Sequence: Synthetic peptide"
SMITNWYFDV

SEQ ID NO: 759 - protein, 120 aa, Artificial Sequence; identical to SEQ ID NO: 55
  source: /note="Description of Artificial Sequence: Synthetic polypeptide"

SEQ ID NO: 760 - protein, 450 aa, Artificial Sequence; identical to SEQ ID NO: 56
  source: /note="Description of Artificial Sequence: Synthetic polypeptide"

SEQ ID NO: 761 - protein, 10 aa, Artificial Sequence
  source: /note="Description of Artificial Sequence: Synthetic peptide"
KAQLSVGYMH

SEQ ID NO: 762 - protein, 7 aa, Artificial Sequence
  source: /note="Description of Artificial Sequence: Synthetic peptide"
DTSKLAS

SEQ ID NO: 763 - protein, 131 aa, Artificial Sequence
  source: /note="Description of Artificial Sequence: Synthetic polypeptide"
FQGSGLTCLGGFASPGPVPPSTALRELIEELVNITQNQKAPLCNGSMVWSINLTAGMYCAALESLINVSGCSAIEKTQRMLSGFCPHKVSAGQFSSLHVRDTKIEVAQFVKDLLLHLKKLFREGQFNYPFT

SEQ ID NO: 764 - protein, 6 aa, Artificial Sequence
  source: /note="Description of Artificial Sequence: Synthetic peptide"
QLSVGY

SEQ ID NO: 765 - protein, 3 aa, Artificial Sequence
  source: /note="Description of Artificial Sequence: Synthetic peptide"
DTS

SEQ ID NO: 766 - protein, 128 aa, Artificial Sequence
  source: /note="Description of Artificial Sequence: Synthetic polypeptide"
GSGLTCLGGFASPGPVPPSTALRELIEELVNITQNQKAPLCNGSMVWSINLTAGMYCAALESLINVSGCSAIEKTQRMLSGFCPHKVSAGQFSSLHVRDTKIEVAQFVKDLLLHLKKLFREGQFNYPF

SEQ ID NO: 767 - protein, 228 aa, Artificial Sequence
  source: /note="Description of Artificial Sequence: Synthetic polypeptide"
DIQMTQSPSTLSASVGDRVTITCKAQLSVGYMHWYQQKPGKAPKLLIYDTSKLASGVPSRFSGSGSGTEFTLTISSLQPDDFATYYCFQGSGLTCLGGFASPGPVPPSTALRELIEELVNITQNQKAPLCNGSMVWSINLTAGMYCAALESLINVSGCSAIEKTQRMLSGFCPHKVSAGQFSSLHVRDTKIEVAQFVKDLLLHLKKLFREGQFNYPFTFGGGTKLEIK

SEQ ID NO: 768 - protein, 335 aa, Artificial Sequence
  source: /note="Description of Artificial Sequence: Synthetic polypeptide"
DIQMTQSPSTLSASVGDRVTITCKAQLSVGYMHWYQQKPGKAPKLLIYDTSKLASGVPSRFSGSGSGTEFTLTISSLQPDDFATYYCFQGSGLTCLGGFASPGPVPPSTALRELIEELVNITQNQKAPLCNGSMVWSINLTAGMYCAALESLINVSGCSAIEKTQRMLSGFCPHKVSAGQFSSLHVRDTKIEVAQFVKDLLLHLKKLFREGQFNYPFTFGGGTKLEIKRTVAAPSVFIFPPSDEQLKSGTASVVCLLNNFYPREAKVQWKVDNALQSGNSQESVTEQDSKDSTYSLSSTLTLSKADYEKHKVYACEVTHQGLSSPVTKSFNRGEC

SEQ ID NO: 769 - protein, 145 aa, Artificial Sequence
  source: /note="Description of Artificial Sequence: Synthetic polypeptide"
SEPTTVAFDVRPGGVVHSFSHNVGPGDKYTCMFTYASQGGTNEQWQMSLGTSEDHQHFTCTIWRPQGKSYLYFTQFKAEVRGAEIEYAMAYSKAAFERESDVPLKTEEFEVTKTAVAHRPGAFKAELSKLVIVAKASSTSGMSVG

SEQ ID NO: 770 - protein, 16 aa, Artificial Sequence
  source: /note="Description of Artificial Sequence: Synthetic peptide"
DIWWDDKKDYNPSLKS

SEQ ID NO: 771 - protein, 10 aa, Artificial Sequence
  source: /note="Description of Artificial Sequence: Synthetic peptide"
SMITNWYFDV

SEQ ID NO: 772 - protein, 147 aa, Artificial Sequence
  source: /note="Description of Artificial Sequence: Synthetic polypeptide"
GFSLVSEPTTVAFDVRPGGVVHSFSHNVGPGDKYTCMFTYASQGGTNEQWQMSLGTSEDHQHFTCTIWRPQGKSYLYFTQFKAEVRGAEIEYAMAYSKAAFERESDVPLKTEEFEVTKTAVAHRPGAFKAELSKLVIVAKASSTSGM

SEQ ID NO: 773 - protein, 5 aa, Artificial Sequence
  source: /note="Description of Artificial Sequence: Synthetic peptide"
WWDDK

SEQ ID NO: 774 - protein, 10 aa, Artificial Sequence
  source: /note="Description of Artificial Sequence: Synthetic peptide"
SMITNWYFDV

SEQ ID NO: 775 - protein, 258 aa, Artificial Sequence
  source: /note="Description of Artificial Sequence: Synthetic polypeptide"
QVTLRESGPALVKPTQTLTLTCTFSGFSLVSEPTTVAFDVRPGGVVHSFSHNVGPGDKYTCMFTYASQGGTNEQWQMSLGTSEDHQHFTCTIWRPQGKSYLYFTQFKAEVRGAEIEYAMAYSKAAFERESDVPLKTEEFEVTKTAVAHRPGAFKAELSKLVIVAKASSTSGMSVGWIRQPPGKALEWLADIWWDDKKDYNPSLKSRLTISKDTSKNQVVLKVTNMDPADTATYYCARSMITNWYFDVWGAGTTVTVSS

SEQ ID NO: 776 - protein, 588 aa, Artificial Sequence
  source: /note="Description of Artificial Sequence: Synthetic polypeptide"
QVTLRESGPALVKPTQTLTLTCTFSGFSLVSEPTTVAFDVRPGGVVHSFSHNVGPGDKYTCMFTYASQGGTNEQWQMSLGTSEDHQHFTCTIWRPQGKSYLYFTQFKAEVRGAEIEYAMAYSKAAFERESDVPLKTEEFEVTKTAVAHRPGAFKAELSKLVIVAKASSTSGMSVGWIRQPPGKALEWLADIWWDDKKDYNPSLKSRLTISKDTSKNQVVLKVTNMDPADTATYYCARSMITNWYFDVWGAGTTVTVSSASTKGPSVFPLAPSSKSTSGGTAALGCLVKDYFPEPVTVSWNSGALTSGVHTFPAVLQSSGLYSLSSVVTVPSSSLGTQTYICNVNHKPSNTKVDKRVEPKSCDKTHTCPPCPAPELLGGPSVFLFPPKPKDTLMISRTPEVTCVVVAVSHEDPEVKFNWYVDGVEVHNAKTKPREEQYNSTYRVVSVLTVLHQDWLNGKEYKCKVSNKALAAPIEKTISKAKGQPREPQVYTLPPSREEMTKNQVSLTCLVKGFYPSDIAVEWESNGQPENNYKTTPPVLDSDGSFFLYSKLTVDKSRWQQGNVFSCSVMHEALHNHYTQKSLSLSPGK

SEQ ID NO: 777 - protein, 10 aa, Artificial Sequence
  source: /note="Description of Artificial Sequence: Synthetic peptide"
KAQLSVGYMH

SEQ ID NO: 778 - protein, 7 aa, Artificial Sequence
  source: /note="Description of Artificial Sequence: Synthetic peptide"
DTSKLAS

SEQ ID NO: 779 - protein, 9 aa, Artificial Sequence
  source: /note="Description of Artificial Sequence: Synthetic peptide"
FQGSGYPFT

SEQ ID NO: 780 - protein, 6 aa, Artificial Sequence
  source: /note="Description of Artificial Sequence: Synthetic peptide"
QLSVGY

SEQ ID NO: 781 - protein, 3 aa, Artificial Sequence
  source: /note="Description of Artificial Sequence: Synthetic peptide"
DTS

SEQ ID NO: 782 - protein, 6 aa, Artificial Sequence
  source: /note="Description of Artificial Sequence: Synthetic peptide"
GSGYPF

SEQ ID NO: 783 - protein, 106 aa, Artificial Sequence; identical to SEQ ID NO: 15
  source: /note="Description of Artificial Sequence: Synthetic polypeptide"

SEQ ID NO: 784 - protein, 213 aa, Artificial Sequence; identical to SEQ ID NO: 16
  source: /note="Description of Artificial Sequence: Synthetic polypeptide"

SEQ ID NO: 785 - protein, 7 aa, Artificial Sequence
  source: /note="Description of Artificial Sequence: Synthetic peptide"
TSGMSVG

SEQ ID NO: 786 - protein, 154 aa, Artificial Sequence
  source: /note="Description of Artificial Sequence: Synthetic polypeptide"
DIWWDVSEPTTVAFDVRPGGVVHSFSHNVGPGDKYTCMFTYASQGGTNEQWQMSLGTSEDHQHFTCTIWRPQGKSYLYFTQFKAEVRGAEIEYAMAYSKAAFERESDVPLKTEEFEVTKTAVAHRPGAFKAELSKLVIVAKASDKKDYNPSLKS

SEQ ID NO: 787 - protein, 10 aa, Artificial Sequence
  source: /note="Description of Artificial Sequence: Synthetic peptide"
SMITNWYFDV

SEQ ID NO: 788 - protein, 9 aa, Artificial Sequence
  source: /note="Description of Artificial Sequence: Synthetic peptide"
GFSLSTSGM

SEQ ID NO: 789 - protein, 143 aa, Artificial Sequence
  source: /note="Description of Artificial Sequence: Synthetic polypeptide"
WWDVSEPTTVAFDVRPGGVVHSFSHNVGPGDKYTCMFTYASQGGTNEQWQMSLGTSEDHQHFTCTIWRPQGKSYLYFTQFKAEVRGAEIEYAMAYSKAAFERESDVPLKTEEFEVTKTAVAHRPGAFKAELSKLVIVAKASDK

SEQ ID NO: 790 - protein, 10 aa, Artificial Sequence
  source: /note="Description of Artificial Sequence: Synthetic peptide"
SMITNWYFDV

SEQ ID NO: 791 - protein, 258 aa, Artificial Sequence
  source: /note="Description of Artificial Sequence: Synthetic polypeptide"
QVTLRESGPALVKPTQTLTLTCTFSGFSLSTSGMSVGWIRQPPGKALEWLADIWWDVSEPTTVAFDVRPGGVVHSFSHNVGPGDKYTCMFTYASQGGTNEQWQMSLGTSEDHQHFTCTIWRPQGKSYLYFTQFKAEVRGAEIEYAMAYSKAAFERESDVPLKTEEFEVTKTAVAHRPGAFKAELSKLVIVAKASDKKDYNPSLKSRLTISKDTSKNQVVLKVTNMDPADTATYYCARSMITNWYFDVWGAGTTVTVSS

SEQ ID NO: 792 - protein, 588 aa, Artificial Sequence
  source: /note="Description of Artificial Sequence: Synthetic polypeptide"
QVTLRESGPALVKPTQTLTLTCTFSGFSLSTSGMSVGWIRQPPGKALEWLADIWWDVSEPTTVAFDVRPGGVVHSFSHNVGPGDKYTCMFTYASQGGTNEQWQMSLGTSEDHQHFTCTIWRPQGKSYLYFTQFKAEVRGAEIEYAMAYSKAAFERESDVPLKTEEFEVTKTAVAHRPGAFKAELSKLVIVAKASDKKDYNPSLKSRLTISKDTSKNQVVLKVTNMDPADTATYYCARSMITNWYFDVWGAGTTVTVSSASTKGPSVFPLAPSSKSTSGGTAALGCLVKDYFPEPVTVSWNSGALTSGVHTFPAVLQSSGLYSLSSVVTVPSSSLGTQTYICNVNHKPSNTKVDKRVEPKSCDKTHTCPPCPAPELLGGPSVFLFPPKPKDTLMISRTPEVTCVVVAVSHEDPEVKFNWYVDGVEVHNAKTKPREEQYNSTYRVVSVLTVLHQDWLNGKEYKCKVSNKALAAPIEKTISKAKGQPREPQVYTLPPSREEMTKNQVSLTCLVKGFYPSDIAVEWESNGQPENNYKTTPPVLDSDGSFFLYSKLTVDKSRWQQGNVFSCSVMHEALHNHYTQKSLSLSPGK

SEQ ID NO: 793 - protein, 10 aa, Artificial Sequence
  source: /note="Description of Artificial Sequence: Synthetic peptide"
KAQLSVGYMH

SEQ ID NO: 794 - protein, 7 aa, Artificial Sequence
  source: /note="Description of Artificial Sequence: Synthetic peptide"
DTSKLAS

SEQ ID NO: 795 - protein, 9 aa, Artificial Sequence
  source: /note="Description of Artificial Sequence: Synthetic peptide"
FQGSGYPFT

SEQ ID NO: 796 - protein, 6 aa, Artificial Sequence
  source: /note="Description of Artificial Sequence: Synthetic peptide"
QLSVGY

SEQ ID NO: 797 - protein, 3 aa, Artificial Sequence
  source: /note="Description of Artificial Sequence: Synthetic peptide"
DTS

SEQ ID NO: 798 - protein, 6 aa, Artificial Sequence
  source: /note="Description of Artificial Sequence: Synthetic peptide"
GSGYPF

SEQ ID NO: 799 - protein, 106 aa, Artificial Sequence; identical to SEQ ID NO: 15
  source: /note="Description of Artificial Sequence: Synthetic polypeptide"

SEQ ID NO: 800 - protein, 213 aa, Artificial Sequence; identical to SEQ ID NO: 16
  source: /note="Description of Artificial Sequence: Synthetic polypeptide"

SEQ ID NO: 801 - protein, 7 aa, Artificial Sequence
  source: /note="Description of Artificial Sequence: Synthetic peptide"
TSGMSVG

SEQ ID NO: 802 - protein, 16 aa, Artificial Sequence
  source: /note="Description of Artificial Sequence: Synthetic peptide"
DIWWDDKKDYNPSLKS

SEQ ID NO: 803 - protein, 148 aa, Artificial Sequence
  source: /note="Description of Artificial Sequence: Synthetic polypeptide"
SMITVSEPTTVAFDVRPGGVVHSFSHNVGPGDKYTCMFTYASQGGTNEQWQMSLGTSEDHQHFTCTIWRPQGKSYLYFTQFKAEVRGAEIEYAMAYSKAAFERESDVPLKTEEFEVTKTAVAHRPGAFKAELSKLVIVAKASNWYFDV

SEQ ID NO: 804 - protein, 9 aa, Artificial Sequence
  source: /note="Description of Artificial Sequence: Synthetic peptide"
GFSLSTSGM

SEQ ID NO: 805 - protein, 5 aa, Artificial Sequence
  source: /note="Description of Artificial Sequence: Synthetic peptide"
WWDDK

SEQ ID NO: 806 - protein, 148 aa, Artificial Sequence; identical to SEQ ID NO: 803
  source: /note="Description of Artificial Sequence: Synthetic polypeptide"

SEQ ID NO: 807 - protein, 258 aa, Artificial Sequence
  source: /note="Description of Artificial Sequence: Synthetic polypeptide"
QVTLRESGPALVKPTQTLTLTCTFSGFSLSTSGMSVGWIRQPPGKALEWLADIWWDDKKDYNPSLKSRLTISKDTSKNQVVLKVTNMDPADTATYYCARSMITVSEPTTVAFDVRPGGVVHSFSHNVGPGDKYTCMFTYASQGGTNEQWQMSLGTSEDHQHFTCTIWRPQGKSYLYFTQFKAEVRGAEIEYAMAYSKAAFERESDVPLKTEEFEVTKTAVAHRPGAFKAELSKLVIVAKASNWYFDVWGAGTTVTVSS

SEQ ID NO: 808 - protein, 588 aa, Artificial Sequence
  source: /note="Description of Artificial Sequence: Synthetic polypeptide"
QVTLRESGPALVKPTQTLTLTCTFSGFSLSTSGMSVGWIRQPPGKALEWLADIWWDDKKDYNPSLKSRLTISKDTSKNQVVLKVTNMDPADTATYYCARSMITVSEPTTVAFDVRPGGVVHSFSHNVGPGDKYTCMFTYASQGGTNEQWQMSLGTSEDHQHFTCTIWRPQGKSYLYFTQFKAEVRGAEIEYAMAYSKAAFERESDVPLKTEEFEVTKTAVAHRPGAFKAELSKLVIVAKASNWYFDVWGAGTTVTVSSASTKGPSVFPLAPSSKSTSGGTAALGCLVKDYFPEPVTVSWNSGALTSGVHTFPAVLQSSGLYSLSSVVTVPSSSLGTQTYICNVNHKPSNTKVDKRVEPKSCDKTHTCPPCPAPELLGGPSVFLFPPKPKDTLMISRTPEVTCVVVAVSHEDPEVKFNWYVDGVEVHNAKTKPREEQYNSTYRVVSVLTVLHQDWLNGKEYKCKVSNKALAAPIEKTISKAKGQPREPQVYTLPPSREEMTKNQVSLTCLVKGFYPSDIAVEWESNGQPENNYKTTPPVLDSDGSFFLYSKLTVDKSRWQQGNVFSCSVMHEALHNHYTQKSLSLSPGK

SEQ ID NO: 809 - protein, 10 aa, Artificial Sequence
  source: /note="Description of Artificial Sequence: Synthetic peptide"
KAQLSVGYMH

SEQ ID NO: 810 - protein, 7 aa, Artificial Sequence
  source: /note="Description of Artificial Sequence: Synthetic peptide"
DTSKLAS

SEQ ID NO: 811 - protein, 9 aa, Artificial Sequence
  source: /note="Description of Artificial Sequence: Synthetic peptide"
FQGSGYPFT

SEQ ID NO: 812 - protein, 6 aa, Artificial Sequence
  source: /note="Description of Artificial Sequence: Synthetic peptide"
QLSVGY

SEQ ID NO: 813 - protein, 3 aa, Artificial Sequence
  source: /note="Description of Artificial Sequence: Synthetic peptide"
DTS

SEQ ID NO: 814 - protein, 6 aa, Artificial Sequence
  source: /note="Description of Artificial Sequence: Synthetic peptide"
GSGYPF

SEQ ID NO: 815 - protein, 106 aa, Artificial Sequence; identical to SEQ ID NO: 15
  source: /note="Description of Artificial Sequence: Synthetic polypeptide"

SEQ ID NO: 816 - protein, 213 aa, Artificial Sequence; identical to SEQ ID NO: 16
  source: /note="Description of Artificial Sequence: Synthetic polypeptide"

SEQ ID NO: 817 - protein, 7 aa, Artificial Sequence
  source: /note="Description of Artificial Sequence: Synthetic peptide"
TSGMSVG

SEQ ID NO: 818 - protein, 15 aa, Artificial Sequence
  source: /note="Description of Artificial Sequence: Synthetic peptide"
DIWWDDKKDYNPSLK

SEQ ID NO: 819 - protein, 10 aa, Artificial Sequence
  source: /note="Description of Artificial Sequence: Synthetic peptide"
SMITNWYFDV

SEQ ID NO: 820 - protein, 9 aa, Artificial Sequence
  source: /note="Description of Artificial Sequence: Synthetic peptide"
GFSLSTSGM

SEQ ID NO: 821 - protein, 5 aa, Artificial Sequence
  source: /note="Description of Artificial Sequence: Synthetic peptide"
WWDDK

SEQ ID NO: 822 - protein, 10 aa, Artificial Sequence
  source: /note="Description of Artificial Sequence: Synthetic peptide"
SMITNWYFDV

SEQ ID NO: 823 - protein, 120 aa, Artificial Sequence; identical to SEQ ID NO: 55
  source: /note="Description of Artificial Sequence: Synthetic polypeptide"

SEQ ID NO: 824 - protein, 450 aa, Artificial Sequence; identical to SEQ ID NO: 56
  source: /note="Description of Artificial Sequence: Synthetic polypeptide"

SEQ ID NO: 825 - protein, 148 aa, Artificial Sequence
  source: /note="Description of Artificial Sequence: Synthetic polypeptide"
KAQLSVSEPTTVAFDVRPGGVVHSFSHNVGPGDKYTCMFTYASQGGTNEQWQMSLGTSEDHQHFTCTIWRPQGKSYLYFTQFKAEVRGAEIEYAMAYSKAAFERESDVPLKTEEFEVTKTAVAHRPGAFKAELSKLVIVAKASVGYMH

SEQ ID NO: 826 - protein, 7 aa, Artificial Sequence
  source: /note="Description of Artificial Sequence: Synthetic peptide"
DTSKLAS

SEQ ID NO: 827 - protein, 9 aa, Artificial Sequence
  source: /note="Description of Artificial Sequence: Synthetic peptide"
FQGSGYPFT

SEQ ID NO: 828 - protein, 144 aa, Artificial Sequence
  source: /note="Description of Artificial Sequence: Synthetic polypeptide"
QLSVSEPTTVAFDVRPGGVVHSFSHNVGPGDKYTCMFTYASQGGTNEQWQMSLGTSEDHQHFTCTIWRPQGKSYLYFTQFKAEVRGAEIEYAMAYSKAAFERESDVPLKTEEFEVTKTAVAHRPGAFKAELSKLVIVAKASVGY

SEQ ID NO: 829 - protein, 3 aa, Artificial Sequence
  source: /note="Description of Artificial Sequence: Synthetic peptide"
DTS

SEQ ID NO: 830 - protein, 6 aa, Artificial Sequence
  source: /note="Description of Artificial Sequence: Synthetic peptide"
GSGYPF

SEQ ID NO: 831 - protein, 244 aa, Artificial Sequence
  source: /note="Description of Artificial Sequence: Synthetic polypeptide"
DIQMTQSPSTLSASVGDRVTITCKAQLSVSEPTTVAFDVRPGGVVHSFSHNVGPGDKYTCMFTYASQGGTNEQWQMSLGTSEDHQHFTCTIWRPQGKSYLYFTQFKAEVRGAEIEYAMAYSKAAFERESDVPLKTEEFEVTKTAVAHRPGAFKAELSKLVIVAKASVGYMHWYQQKPGKAPKLLIYDTSKLASGVPSRFSGSGSGTEFTLTISSLQPDDFATYYCFQGSGYPFTFGGGTKLEIK

SEQ ID NO: 832 - protein, 351 aa, Artificial Sequence
  source: /note="Description of Artificial Sequence: Synthetic polypeptide"
DIQMTQSPSTLSASVGDRVTITCKAQLSVSEPTTVAFDVRPGGVVHSFSHNVGPGDKYTCMFTYASQGGTNEQWQMSLGTSEDHQHFTCTIWRPQGKSYLYFTQFKAEVRGAEIEYAMAYSKAAFERESDVPLKTEEFEVTKTAVAHRPGAFKAELSKLVIVAKASVGYMHWYQQKPGKAPKLLIYDTSKLASGVPSRFSGSGSGTEFTLTISSLQPDDFATYYCFQGSGYPFTFGGGTKLEIKRTVAAPSVFIFPPSDEQLKSGTASVVCLLNNFYPREAKVQWKVDNALQSGNSQESVTEQDSKDSTYSLSSTLTLSKADYEKHKVYACEVTHQGLSSPVTKSFNRGEC

SEQ ID NO: 833 - protein, 7 aa, Artificial Sequence
  source: /note="Description of Artificial Sequence: Synthetic peptide"
TSGMSVG

SEQ ID NO: 834 - protein, 15 aa, Artificial Sequence
  source: /note="Description of Artificial Sequence: Synthetic peptide"
DIWWDDKKDYNPSLK

SEQ ID NO: 835 - protein, 10 aa, Artificial Sequence
  source: /note="Description of Artificial Sequence: Synthetic peptide"
SMITNWYFDV

SEQ ID NO: 836 - protein, 9 aa, Artificial Sequence
  source: /note="Description of Artificial Sequence: Synthetic peptide"
GFSLSTSGM

SEQ ID NO: 837 - protein, 5 aa, Artificial Sequence
  source: /note="Description of Artificial Sequence: Synthetic peptide"
WWDDK

SEQ ID NO: 838 - protein, 10 aa, Artificial Sequence
  source: /note="Description of Artificial Sequence: Synthetic peptide"
SMITNWYFDV

SEQ ID NO: 839 - protein, 120 aa, Artificial Sequence; identical to SEQ ID NO: 55
  source: /note="Description of Artificial Sequence: Synthetic polypeptide"

SEQ ID NO: 840 - protein, 450 aa, Artificial Sequence; identical to SEQ ID NO: 56
  source: /note="Description of Artificial Sequence: Synthetic polypeptide"

SEQ ID NO: 841 - protein, 10 aa, Artificial Sequence
  source: /note="Description of Artificial Sequence: Synthetic peptide"
KAQLSVGYMH

SEQ ID NO: 842 - protein, 145 aa, Artificial Sequence
  source: /note="Description of Artificial Sequence: Synthetic polypeptide"
DTVSEPTTVAFDVRPGGVVHSFSHNVGPGDKYTCMFTYASQGGTNEQWQMSLGTSEDHQHFTCTIWRPQGKSYLYFTQFKAEVRGAEIEYAMAYSKAAFERESDVPLKTEEFEVTKTAVAHRPGAFKAELSKLVIVAKASSKLAS

SEQ ID NO: 843 - protein, 9 aa, Artificial Sequence
  source: /note="Description of Artificial Sequence: Synthetic peptide"
FQGSGYPFT

SEQ ID NO: 844 - protein, 6 aa, Artificial Sequence
  source: /note="Description of Artificial Sequence: Synthetic peptide"
QLSVGY

SEQ ID NO: 845 - protein, 141 aa, Artificial Sequence
  source: /note="Description of Artificial Sequence: Synthetic polypeptide"
DTVSEPTTVAFDVRPGGVVHSFSHNVGPGDKYTCMFTYASQGGTNEQWQMSLGTSEDHQHFTCTIWRPQGKSYLYFTQFKAEVRGAEIEYAMAYSKAAFERESDVPLKTEEFEVTKTAVAHRPGAFKAELSKLVIVAKASS

SEQ ID NO: 846 - protein, 6 aa, Artificial Sequence
  source: /note="Description of Artificial Sequence: Synthetic peptide"
GSGYPF

SEQ ID NO: 847 - protein, 244 aa, Artificial Sequence
  source: /note="Description of Artificial Sequence: Synthetic polypeptide"
DIQMTQSPSTLSASVGDRVTITCKAQLSVGYMHWYQQKPGKAPKLLIYDTVSEPTTVAFDVRPGGVVHSFSHNVGPGDKYTCMFTYASQGGTNEQWQMSLGTSEDHQHFTCTIWRPQGKSYLYFTQFKAEVRGAEIEYAMAYSKAAFERESDVPLKTEEFEVTKTAVAHRPGAFKAELSKLVIVAKASSKLASGVPSRFSGSGSGTEFTLTISSLQPDDFATYYCFQGSGYPFTFGGGTKLEIK

SEQ ID NO: 848 - protein, 351 aa, Artificial Sequence
  source: /note="Description of Artificial Sequence: Synthetic polypeptide"
DIQMTQSPSTLSASVGDRVTITCKAQLSVGYMHWYQQKPGKAPKLLIYDTVSEPTTVAFDVRPGGVVHSFSHNVGPGDKYTCMFTYASQGGTNEQWQMSLGTSEDHQHFTCTIWRPQGKSYLYFTQFKAEVRGAEIEYAMAYSKAAFERESDVPLKTEEFEVTKTAVAHRPGAFKAELSKLVIVAKASSKLASGVPSRFSGSGSGTEFTLTISSLQPDDFATYYCFQGSGYPFTFGGGTKLEIKRTVAAPSVFIFPPSDEQLKSGTASVVCLLNNFYPREAKVQWKVDNALQSGNSQESVTEQDSKDSTYSLSSTLTLSKADYEKHKVYACEVTHQGLSSPVTKSFNRGEC

SEQ ID NO: 849 - protein, 7 aa, Artificial Sequence
  source: /note="Description of Artificial Sequence: Synthetic peptide"
TSGMSVG

SEQ ID NO: 850 - protein, 15 aa, Artificial Sequence
  source: /note="Description of Artificial Sequence: Synthetic peptide"
DIWWDDKKDYNPSLK

SEQ ID NO: 851 - protein, 10 aa, Artificial Sequence
  source: /note="Description of Artificial Sequence: Synthetic peptide"
SMITNWYFDV

SEQ ID NO: 852 - protein, 9 aa, Artificial Sequence
  source: /note="Description of Artificial Sequence: Synthetic peptide"
GFSLSTSGM

SEQ ID NO: 853 - protein, 5 aa, Artificial Sequence
  source: /note="Description of Artificial Sequence: Synthetic peptide"
WWDDK

SEQ ID NO: 854 - protein, 10 aa, Artificial Sequence
  source: /note="Description of Artificial Sequence: Synthetic peptide"
SMITNWYFDV

SEQ ID NO: 855 - protein, 120 aa, Artificial Sequence; identical to SEQ ID NO: 55
  source: /note="Description of Artificial Sequence: Synthetic polypeptide"

SEQ ID NO: 856 - protein, 450 aa, Artificial Sequence; identical to SEQ ID NO: 56
  source: /note="Description of Artificial Sequence: Synthetic polypeptide"

SEQ ID NO: 857 - protein, 10 aa, Artificial Sequence
  source: /note="Description of Artificial Sequence: Synthetic peptide"
KAQLSVGYMH

SEQ ID NO: 858 - protein, 7 aa, Artificial Sequence
  source: /note="Description of Artificial Sequence: Synthetic peptide"
DTSKLAS

SEQ ID NO: 859 - protein, 147 aa, Artificial Sequence
  source: /note="Description of Artificial Sequence: Synthetic polypeptide"
FQGSGVSEPTTVAFDVRPGGVVHSFSHNVGPGDKYTCMFTYASQGGTNEQWQMSLGTSEDHQHFTCTIWRPQGKSYLYFTQFKAEVRGAEIEYAMAYSKAAFERESDVPLKTEEFEVTKTAVAHRPGAFKAELSKLVIVAKASYPFT

SEQ ID NO: 860 - protein, 6 aa, Artificial Sequence
  source: /note="Description of Artificial Sequence: Synthetic peptide"
QLSVGY

SEQ ID NO: 861 - protein, 3 aa, Artificial Sequence
  source: /note="Description of Artificial Sequence: Synthetic peptide"
DTS

SEQ ID NO: 862 - protein, 144 aa, Artificial Sequence
  source: /note="Description of Artificial Sequence: Synthetic polypeptide"
GSGVSEPTTVAFDVRPGGVVHSFSHNVGPGDKYTCMFTYASQGGTNEQWQMSLGTSEDHQHFTCTIWRPQGKSYLYFTQFKAEVRGAEIEYAMAYSKAAFERESDVPLKTEEFEVTKTAVAHRPGAFKAELSKLVIVAKASYPF

SEQ ID NO: 863 - protein, 244 aa, Artificial Sequence
  source: /note="Description of Artificial Sequence: Synthetic polypeptide"
DIQMTQSPSTLSASVGDRVTITCKAQLSVGYMHWYQQKPGKAPKLLIYDTSKLASGVPSRFSGSGSGTEFTLTISSLQPDDFATYYCFQGSGVSEPTTVAFDVRPGGVVHSFSHNVGPGDKYTCMFTYASQGGTNEQWQMSLGTSEDHQHFTCTIWRPQGKSYLYFTQFKAEVRGAEIEYAMAYSKAAFERESDVPLKTEEFEVTKTAVAHRPGAFKAELSKLVIVAKASYPFTFGGGTKLEIK

SEQ ID NO: 864 - protein, 351 aa, Artificial Sequence
  source: /note="Description of Artificial Sequence: Synthetic polypeptide"
DIQMTQSPSTLSASVGDRVTITCKAQLSVGYMHWYQQKPGKAPKLLIYDTSKLASGVPSRFSGSGSGTEFTLTISSLQPDDFATYYCFQGSGVSEPTTVAFDVRPGGVVHSFSHNVGPGDKYTCMFTYASQGGTNEQWQMSLGTSEDHQHFTCTIWRPQGKSYLYFTQFKAEVRGAEIEYAMAYSKAAFERESDVPLKTEEFEVTKTAVAHRPGAFKAELSKLVIVAKASYPFTFGGGTKLEIKRTVAAPSVFIFPPSDEQLKSGTASVVCLLNNFYPREAKVQWKVDNALQSGNSQESVTEQDSKDSTYSLSSTLTLSKADYEKHKVYACEVTHQGLSSPVTKSFNRGEC

SEQ ID NO: 865 - protein, 148 aa, Artificial Sequence
  source: /note="Description of Artificial Sequence: Synthetic polypeptide"
HTLPVRLLRPSDDVQKIVEELQSLSKMLLKDVEEEKGVLVSQNYTLPCLSPDAQPPNNIHSPAIRAYLKTIRQLDNKSVIDEIIEHLDKLIFQDAPETNISVPTDTHECKRFILTISQQFSECMDLALKSLTSGAQQATTSTSGMSVG

SEQ ID NO: 866 - protein, 16 aa, Artificial Sequence
  source: /note="Description of Artificial Sequence: Synthetic peptide"
DIWWDDKKDYNPSLKS

SEQ ID NO: 867 - protein, 10 aa, Artificial Sequence
  source: /note="Description of Artificial Sequence: Synthetic peptide"
SMITNWYFDV

SEQ ID NO: 868 - protein, 150 aa, Artificial Sequence
  source: /note="Description of Artificial Sequence: Synthetic polypeptide"
GFSLSHTLPVRLLRPSDDVQKIVEELQSLSKMLLKDVEEEKGVLVSQNYTLPCLSPDAQPPNNIHSPAIRAYLKTIRQLDNKSVIDEIIEHLDKLIFQDAPETNISVPTDTHECKRFILTISQQFSECMDLALKSLTSGAQQATTSTSGM

SEQ ID NO: 869 - protein, 5 aa, Artificial Sequence
  source: /note="Description of Artificial Sequence: Synthetic peptide"
WWDDK

SEQ ID NO: 870 - protein, 10 aa, Artificial Sequence
  source: /note="Description of Artificial Sequence: Synthetic peptide"
SMITNWYFDV

SEQ ID NO: 871 - protein, 261 aa, Artificial Sequence
  source: /note="Description of Artificial Sequence: Synthetic polypeptide"
QVTLRESGPALVKPTQTLTLTCTFSGFSLSHTLPVRLLRPSDDVQKIVEELQSLSKMLLKDVEEEKGVLVSQNYTLPCLSPDAQPPNNIHSPAIRAYLKTIRQLDNKSVIDEIIEHLDKLIFQDAPETNISVPTDTHECKRFILTISQQFSECMDLALKSLTSGAQQATTSTSGMSVGWIRQPPGKALEWLADIWWDDKKDYNPSLKSRLTISKDTSKNQVVLKVTNMDPADTATYYCARSMITNWYFDVWGAGTTVTVSS

SEQ ID NO: 872 - protein, 591 aa, Artificial Sequence
  source: /note="Description of Artificial Sequence: Synthetic polypeptide"
QVTLRESGPALVKPTQTLTLTCTFSGFSLSHTLPVRLLRPSDDVQKIVEELQSLSKMLLKDVEEEKGVLVSQNYTLPCLSPDAQPPNNIHSPAIRAYLKTIRQLDNKSVIDEIIEHLDKLIFQDAPETNISVPTDTHECKRFILTISQQFSECMDLALKSLTSGAQQATTSTSGMSVGWIRQPPGKALEWLADIWWDDKKDYNPSLKSRLTISKDTSKNQVVLKVTNMDPADTATYYCARSMITNWYFDVWGAGTTVTVSSASTKGPSVFPLAPSSKSTSGGTAALGCLVKDYFPEPVTVSWNSGALTSGVHTFPAVLQSSGLYSLSSVVTVPSSSLGTQTYICNVNHKPSNTKVDKRVEPKSCDKTHTCPPCPAPELLGGPSVFLFPPKPKDTLMISRTPEVTCVVVAVSHEDPEVKFNWYVDGVEVHNAKTKPREEQYNSTYRVVSVLTVLHQDWLNGKEYKCKVSNKALAAPIEKTISKAKGQPREPQVYTLPPSREEMTKNQVSLTCLVKGFYPSDIAVEWESNGQPENNYKTTPPVLDSDGSFFLYSKLTVDKSRWQQGNVFSCSVMHEALHNHYTQKSLSLSPGK

SEQ ID NO: 873 - protein, 10 aa, Artificial Sequence
  source: /note="Description of Artificial Sequence: Synthetic peptide"
KAQLSVGYMH

SEQ ID NO: 874 - protein, 7 aa, Artificial Sequence
  source: /note="Description of Artificial Sequence: Synthetic peptide"
DTSKLAS

SEQ ID NO: 875 - protein, 9 aa, Artificial Sequence
  source: /note="Description of Artificial Sequence: Synthetic peptide"
FQGSGYPFT

SEQ ID NO: 876 - protein, 6 aa, Artificial Sequence
  source: /note="Description of Artificial Sequence: Synthetic peptide"
QLSVGY

SEQ ID NO: 877 - protein, 3 aa, Artificial Sequence
  source: /note="Description of Artificial Sequence: Synthetic peptide"
DTS

SEQ ID NO: 878 - protein, 6 aa, Artificial Sequence
  source: /note="Description of Artificial Sequence: Synthetic peptide"
GSGYPF

SEQ ID NO: 879 - protein, 106 aa, Artificial Sequence; identical to SEQ ID NO: 15
  source: /note="Description of Artificial Sequence: Synthetic polypeptide"

SEQ ID NO: 880 - protein, 213 aa, Artificial Sequence; identical to SEQ ID NO: 16
  source: /note="Description of Artificial Sequence: Synthetic polypeptide"

SEQ ID NO: 881 - protein, 7 aa, Artificial Sequence
  source: /note="Description of Artificial Sequence: Synthetic peptide"
TSGMSVG

SEQ ID NO: 882 - protein, 157 aa, Artificial Sequence
  source: /note="Description of Artificial Sequence: Synthetic polypeptide"
DIWWDSHTLPVRLLRPSDDVQKIVEELQSLSKMLLKDVEEEKGVLVSQNYTLPCLSPDAQPPNNIHSPAIRAYLKTIRQLDNKSVIDEIIEHLDKLIFQDAPETNISVPTDTHECKRFILTISQQFSECMDLALKSLTSGAQQATTDKKDYNPSLKS

SEQ ID NO: 883 - protein, 10 aa, Artificial Sequence
  source: /note="Description of Artificial Sequence: Synthetic peptide"
SMITNWYFDV

SEQ ID NO: 884 - protein, 9 aa, Artificial Sequence
  source: /note="Description of Artificial Sequence: Synthetic peptide"
GFSLSTSGM

SEQ ID NO: 885 - protein, 146 aa, Artificial Sequence
  source: /note="Description of Artificial Sequence: Synthetic polypeptide"
WWDSHTLPVRLLRPSDDVQKIVEELQSLSKMLLKDVEEEKGVLVSQNYTLPCLSPDAQPPNNIHSPAIRAYLKTIRQLDNKSVIDEIIEHLDKLIFQDAPETNISVPTDTHECKRFILTISQQFSECMDLALKSLTSGAQQATTDK

SEQ ID NO: 886 - protein, 10 aa, Artificial Sequence
  source: /note="Description of Artificial Sequence: Synthetic peptide"
SMITNWYFDV

SEQ ID NO: 887 - protein, 261 aa, Artificial Sequence
  source: /note="Description of Artificial Sequence: Synthetic polypeptide"
QVTLRESGPALVKPTQTLTLTCTFSGFSLSTSGMSVGWIRQPPGKALEWLADIWWDSHTLPVRLLRPSDDVQKIVEELQSLSKMLLKDVEEEKGVLVSQNYTLPCLSPDAQPPNNIHSPAIRAYLKTIRQLDNKSVIDEIIEHLDKLIFQDAPETNISVPTDTHECKRFILTISQQFSECMDLALKSLTSGAQQATTDKKDYNPSLKSRLTISKDTSKNQVVLKVTNMDPADTATYYCARSMITNWYFDVWGAGTTVTVSS

SEQ ID NO: 888 - protein, 591 aa, Artificial Sequence
  source: /note="Description of Artificial Sequence: Synthetic polypeptide"
QVTLRESGPALVKPTQTLTLTCTFSGFSLSTSGMSVGWIRQPPGKALEWLADIWWDSHTLPVRLLRPSDDVQKIVEELQSLSKMLLKDVEEEKGVLVSQNYTLPCLSPDAQPPNNIHSPAIRAYLKTIRQLDNKSVIDEIIEHLDKLIFQDAPETNISVPTDTHECKRFILTISQQFSECMDLALKSLTSGAQQATTDKKDYNPSLKSRLTISKDTSKNQVVLKVTNMDPADTATYYCARSMITNWYFDVWGAGTTVTVSSASTKGPSVFPLAPSSKSTSGGTAALGCLVKDYFPEPVTVSWNSGALTSGVHTFPAVLQSSGLYSLSSVVTVPSSSLGTQTYICNVNHKPSNTKVDKRVEPKSCDKTHTCPPCPAPELLGGPSVFLFPPKPKDTLMISRTPEVTCVVVAVSHEDPEVKFNWYVDGVEVHNAKTKPREEQYNSTYRVVSVLTVLHQDWLNGKEYKCKVSNKALAAPIEKTISKAKGQPREPQVYTLPPSREEMTKNQVSLTCLVKGFYPSDIAVEWESNGQPENNYKTTPPVLDSDGSFFLYSKLTVDKSRWQQGNVFSCSVMHEALHNHYTQKSLSLSPGK

SEQ ID NO: 889 - protein, 10 aa, Artificial Sequence
  source: /note="Description of Artificial Sequence: Synthetic peptide"
KAQLSVGYMH

SEQ ID NO: 890 - protein, 7 aa, Artificial Sequence
  source: /note="Description of Artificial Sequence: Synthetic peptide"
DTSKLAS

SEQ ID NO: 891 - protein, 9 aa, Artificial Sequence
  source: /note="Description of Artificial Sequence: Synthetic peptide"
FQGSGYPFT

SEQ ID NO: 892 - protein, 6 aa, Artificial Sequence
  source: /note="Description of Artificial Sequence: Synthetic peptide"
QLSVGY

SEQ ID NO: 893 - protein, 3 aa, Artificial Sequence
  source: /note="Description of Artificial Sequence: Synthetic peptide"
DTS

SEQ ID NO: 894 - protein, 6 aa, Artificial Sequence
  source: /note="Description of Artificial Sequence: Synthetic peptide"
GSGYPF

SEQ ID NO: 895 - protein, 106 aa, Artificial Sequence; identical to SEQ ID NO: 15
  source: /note="Description of Artificial Sequence: Synthetic polypeptide"

SEQ ID NO: 896 - protein, 213 aa, Artificial Sequence; identical to SEQ ID NO: 16
  source: /note="Description of Artificial Sequence: Synthetic polypeptide"

SEQ ID NO: 897 - protein, 7 aa, Artificial Sequence
  source: /note="Description of Artificial Sequence: Synthetic peptide"
TSGMSVG

SEQ ID NO: 898 - protein, 16 aa, Artificial Sequence
  source: /note="Description of Artificial Sequence: Synthetic peptide"
DIWWDDKKDYNPSLKS

SEQ ID NO: 899 - protein, 151 aa, Artificial Sequence
  source: /note="Description of Artificial Sequence: Synthetic polypeptide"
SMITSHTLPVRLLRPSDDVQKIVEELQSLSKMLLKDVEEEKGVLVSQNYTLPCLSPDAQPPNNIHSPAIRAYLKTIRQLDNKSVIDEIIEHLDKLIFQDAPETNISVPTDTHECKRFILTISQQFSECMDLALKSLTSGAQQATTNWYFDV

SEQ ID NO: 900 - protein, 9 aa, Artificial Sequence
  source: /note="Description of Artificial Sequence: Synthetic peptide"
GFSLSTSGM

SEQ ID NO: 901 - protein, 5 aa, Artificial Sequence
  source: /note="Description of Artificial Sequence: Synthetic peptide"
WWDDK

SEQ ID NO: 902 - protein, 151 aa, Artificial Sequence; identical to SEQ ID NO: 899
  source: /note="Description of Artificial Sequence: Synthetic polypeptide"

SEQ ID NO: 903 - protein, 261 aa, Artificial Sequence
  source: /note="Description of Artificial Sequence: Synthetic polypeptide"
QVTLRESGPALVKPTQTLTLTCTFSGFSLSTSGMSVGWIRQPPGKALEWLADIWWDDKKDYNPSLKSRLTISKDTSKNQVVLKVTNMDPADTATYYCARSMITSHTLPVRLLRPSDDVQKIVEELQSLSKMLLKDVEEEKGVLVSQNYTLPCLSPDAQPPNNIHSPAIRAYLKTIRQLDNKSVIDEIIEHLDKLIFQDAPETNISVPTDTHECKRFILTISQQFSECMDLALKSLTSGAQQATTNWYFDVWGAGTTVTVSS

SEQ ID NO: 904 - protein, 591 aa, Artificial Sequence
  source: /note="Description of Artificial Sequence: Synthetic polypeptide"
QVTLRESGPALVKPTQTLTLTCTFSGFSLSTSGMSVGWIRQPPGKALEWLADIWWDDKKDYNPSLKSRLTISKDTSKNQVVLKVTNMDPADTATYYCARSMITSHTLPVRLLRPSDDVQKIVEELQSLSKMLLKDVEEEKGVLVSQNYTLPCLSPDAQPPNNIHSPAIRAYLKTIRQLDNKSVIDEIIEHLDKLIFQDAPETNISVPTDTHECKRFILTISQQFSECMDLALKSLTSGAQQATTNWYFDVWGAGTTVTVSSASTKGPSVFPLAPSSKSTSGGTAALGCLVKDYFPEPVTVSWNSGALTSGVHTFPAVLQSSGLYSLSSVVTVPSSSLGTQTYICNVNHKPSNTKVDKRVEPKSCDKTHTCPPCPAPELLGGPSVFLFPPKPKDTLMISRTPEVTCVVVAVSHEDPEVKFNWYVDGVEVHNAKTKPREEQYNSTYRVVSVLTVLHQDWLNGKEYKCKVSNKALAAPIEKTISKAKGQPREPQVYTLPPSREEMTKNQVSLTCLVKGFYPSDIAVEWESNGQPENNYKTTPPVLDSDGSFFLYSKLTVDKSRWQQGNVFSCSVMHEALHNHYTQKSLSLSPGK

SEQ ID NO: 905 - protein, 10 aa, Artificial Sequence
  source: /note="Description of Artificial Sequence: Synthetic peptide"
KAQLSVGYMH

SEQ ID NO: 906 - protein, 7 aa, Artificial Sequence
  source: /note="Description of Artificial Sequence: Synthetic peptide"
DTSKLAS

SEQ ID NO: 907 - protein, 9 aa, Artificial Sequence
  source: /note="Description of Artificial Sequence: Synthetic peptide"
FQGSGYPFT

SEQ ID NO: 908 - protein, 6 aa, Artificial Sequence
  source: /note="Description of Artificial Sequence: Synthetic peptide"
QLSVGY

SEQ ID NO: 909 - protein, 3 aa, Artificial Sequence
  source: /note="Description of Artificial Sequence: Synthetic peptide"
DTS

SEQ ID NO: 910 - protein, 6 aa, Artificial Sequence
  source: /note="Description of Artificial Sequence: Synthetic peptide"
GSGYPF

SEQ ID NO: 911 - protein, 106 aa, Artificial Sequence; identical to SEQ ID NO: 15
  source: /note="Description of Artificial Sequence: Synthetic polypeptide"

SEQ ID NO: 912 - protein, 213 aa, Artificial Sequence; identical to SEQ ID NO: 16
  source: /note="Description of Artificial Sequence: Synthetic polypeptide"

SEQ ID NO: 913 - protein, 7 aa, Artificial Sequence
  source: /note="Description of Artificial Sequence: Synthetic peptide"
TSGMSVG

SEQ ID NO: 914 - protein, 15 aa, Artificial Sequence
  source: /note="Description of Artificial Sequence: Synthetic peptide"
DIWWDDKKDYNPSLK

SEQ ID NO: 915 - protein, 10 aa, Artificial Sequence
  source: /note="Description of Artificial Sequence: Synthetic peptide"
SMITNWYFDV

SEQ ID NO: 916 - protein, 9 aa, Artificial Sequence
  source: /note="Description of Artificial Sequence: Synthetic peptide"
GFSLSTSGM

SEQ ID NO: 917 - protein, 5 aa, Artificial Sequence
  source: /note="Description of Artificial Sequence: Synthetic peptide"
WWDDK

SEQ ID NO: 918 - protein, 10 aa, Artificial Sequence
  source: /note="Description of Artificial Sequence: Synthetic peptide"
SMITNWYFDV

SEQ ID NO: 919 - protein, 120 aa, Artificial Sequence; identical to SEQ ID NO: 55
  source: /note="Description of Artificial Sequence: Synthetic polypeptide"

SEQ ID NO: 920 - protein, 450 aa, Artificial Sequence; identical to SEQ ID NO: 56
  source: /note="Description of Artificial Sequence: Synthetic polypeptide"

SEQ ID NO: 921 - protein, 151 aa, Artificial Sequence
  source: /note="Description of Artificial Sequence: Synthetic polypeptide"
KAQLSSHTLPVRLLRPSDDVQKIVEELQSLSKMLLKDVEEEKGVLVSQNYTLPCLSPDAQPPNNIHSPAIRAYLKTIRQLDNKSVIDEIIEHLDKLIFQDAPETNISVPTDTHECKRFILTISQQFSECMDLALKSLTSGAQQATTVGYMH

SEQ ID NO: 922 - protein, 7 aa, Artificial Sequence
  source: /note="Description of Artificial Sequence: Synthetic peptide"
DTSKLAS

SEQ ID NO: 923 - protein, 9 aa, Artificial Sequence
  source: /note="Description of Artificial Sequence: Synthetic peptide"
FQGSGYPFT

SEQ ID NO: 924 - protein, 147 aa, Artificial Sequence
  source: /note="Description of Artificial Sequence: Synthetic polypeptide"
QLSSHTLPVRLLRPSDDVQKIVEELQSLSKMLLKDVEEEKGVLVSQNYTLPCLSPDAQPPNNIHSPAIRAYLKTIRQLDNKSVIDEIIEHLDKLIFQDAPETNISVPTDTHECKRFILTISQQFSECMDLALKSLTSGAQQATTVGY

SEQ ID NO: 925 - protein, 3 aa, Artificial Sequence
  source: /note="Description of Artificial Sequence: Synthetic peptide"
DTS

SEQ ID NO: 926 - protein, 6 aa, Artificial Sequence
  source: /note="Description of Artificial Sequence: Synthetic peptide"
GSGYPF

SEQ ID NO: 927 - protein, 247 aa, Artificial Sequence
  source: /note="Description of Artificial Sequence: Synthetic polypeptide"
DIQMTQSPSTLSASVGDRVTITCKAQLSSHTLPVRLLRPSDDVQKIVEELQSLSKMLLKDVEEEKGVLVSQNYTLPCLSPDAQPPNNIHSPAIRAYLKTIRQLDNKSVIDEIIEHLDKLIFQDAPETNISVPTDTHECKRFILTISQQFSECMDLALKSLTSGAQQATTVGYMHWYQQKPGKAPKLLIYDTSKLASGVPSRFSGSGSGTEFTLTISSLQPDDFATYYCFQGSGYPFTFGGGTKLEIK

SEQ ID NO: 928 - protein, 354 aa, Artificial Sequence
  source: /note="Description of Artificial Sequence: Synthetic polypeptide"
DIQMTQSPSTLSASVGDRVTITCKAQLSSHTLPVRLLRPSDDVQKIVEELQSLSKMLLKDVEEEKGVLVSQNYTLPCLSPDAQPPNNIHSPAIRAYLKTIRQLDNKSVIDEIIEHLDKLIFQDAPETNISVPTDTHECKRFILTISQQFSECMDLALKSLTSGAQQATTVGYMHWYQQKPGKAPKLLIYDTSKLASGVPSRFSGSGSGTEFTLTISSLQPDDFATYYCFQGSGYPFTFGGGTKLEIKRTVAAPSVFIFPPSDEQLKSGTASVVCLLNNFYPREAKVQWKVDNALQSGNSQESVTEQDSKDSTYSLSSTLTLSKADYEKHKVYACEVTHQGLSSPVTKSFNRGEC

SEQ ID NO: 929 - protein, 7 aa, Artificial Sequence
  source: /note="Description of Artificial Sequence: Synthetic peptide"
TSGMSVG

SEQ ID NO: 930 - protein, 15 aa, Artificial Sequence
  source: /note="Description of Artificial Sequence: Synthetic peptide"
DIWWDDKKDYNPSLK

SEQ ID NO: 931 - protein, 10 aa, Artificial Sequence
  source: /note="Description of Artificial Sequence: Synthetic peptide"
SMITNWYFDV

SEQ ID NO: 932 - protein, 9 aa, Artificial Sequence
  source: /note="Description of Artificial Sequence: Synthetic peptide"
GFSLSTSGM

SEQ ID NO: 933 - protein, 5 aa, Artificial Sequence
  source: /note="Description of Artificial Sequence: Synthetic peptide"
WWDDK

SEQ ID NO: 934 - protein, 10 aa, Artificial Sequence
  source: /note="Description of Artificial Sequence: Synthetic peptide"
SMITNWYFDV

SEQ ID NO: 935 - protein, 120 aa, Artificial Sequence; identical to SEQ ID NO: 55
  source: /note="Description of Artificial Sequence: Synthetic polypeptide"

SEQ ID NO: 936 - protein, 450 aa, Artificial Sequence; identical to SEQ ID NO: 56
  source: /note="Description of Artificial Sequence: Synthetic polypeptide"

SEQ ID NO: 937 - protein, 10 aa, Artificial Sequence
  source: /note="Description of Artificial Sequence: Synthetic peptide"
KAQLSVGYMH

SEQ ID NO: 938 - protein, 148 aa, Artificial Sequence
  source: /note="Description of Artificial Sequence: Synthetic polypeptide"
DTSHTLPVRLLRPSDDVQKIVEELQSLSKMLLKDVEEEKGVLVSQNYTLPCLSPDAQPPNNIHSPAIRAYLKTIRQLDNKSVIDEIIEHLDKLIFQDAPETNISVPTDTHECKRFILTISQQFSECMDLALKSLTSGAQQATTSKLAS

SEQ ID NO: 939 - protein, 9 aa, Artificial Sequence
  source: /note="Description of Artificial Sequence: Synthetic peptide"
FQGSGYPFT

SEQ ID NO: 940 - protein, 6 aa, Artificial Sequence
  source: /note="Description of Artificial Sequence: Synthetic peptide"
QLSVGY

SEQ ID NO: 941 - protein, 144 aa, Artificial Sequence
  source: /note="Description of Artificial Sequence: Synthetic polypeptide"
DTSHTLPVRLLRPSDDVQKIVEELQSLSKMLLKDVEEEKGVLVSQNYTLPCLSPDAQPPNNIHSPAIRAYLKTIRQLDNKSVIDEIIEHLDKLIFQDAPETNISVPTDTHECKRFILTISQQFSECMDLALKSLTSGAQQATTS

SEQ ID NO: 942 - protein, 6 aa, Artificial Sequence
  source: /note="Description of Artificial Sequence: Synthetic peptide"
GSGYPF

SEQ ID NO: 943 - protein, 247 aa, Artificial Sequence
  source: /note="Description of Artificial Sequence: Synthetic polypeptide"
DIQMTQSPSTLSASVGDRVTITCKAQLSVGYMHWYQQKPGKAPKLLIYDTSHTLPVRLLRPSDDVQKIVEELQSLSKMLLKDVEEEKGVLVSQNYTLPCLSPDAQPPNNIHSPAIRAYLKTIRQLDNKSVIDEIIEHLDKLIFQDAPETNISVPTDTHECKRFILTISQQFSECMDLALKSLTSGAQQATTSKLASGVPSRFSGSGSGTEFTLTISSLQPDDFATYYCFQGSGYPFTFGGGTKLEIK

SEQ ID NO: 944 - protein, 354 aa, Artificial Sequence
  source: /note="Description of Artificial Sequence: Synthetic polypeptide"
DIQMTQSPSTLSASVGDRVTITCKAQLSVGYMHWYQQKPGKAPKLLIYDTSHTLPVRLLRPSDDVQKIVEELQSLSKMLLKDVEEEKGVLVSQNYTLPCLSPDAQPPNNIHSPAIRAYLKTIRQLDNKSVIDEIIEHLDKLIFQDAPETNISVPTDTHECKRFILTISQQFSECMDLALKSLTSGAQQATTSKLASGVPSRFSGSGSGTEFTLTISSLQPDDFATYYCFQGSGYPFTFGGGTKLEIKRTVAAPSVFIFPPSDEQLKSGTASVVCLLNNFYPREAKVQWKVDNALQSGNSQESVTEQDSKDSTYSLSSTLTLSKADYEKHKVYACEVTHQGLSSPVTKSFNRGEC

SEQ ID NO: 945 - protein, 7 aa, Artificial Sequence
  source: /note="Description of Artificial Sequence: Synthetic peptide"
TSGMSVG

SEQ ID NO: 946 - protein, 15 aa, Artificial Sequence
  source: /note="Description of Artificial Sequence: Synthetic peptide"
DIWWDDKKDYNPSLK

SEQ ID NO: 947 - protein, 10 aa, Artificial Sequence
  source: /note="Description of Artificial Sequence: Synthetic peptide"
SMITNWYFDV

SEQ ID NO: 948 - protein, 9 aa, Artificial Sequence
  source: /note="Description of Artificial Sequence: Synthetic peptide"
GFSLSTSGM

SEQ ID NO: 949 - protein, 5 aa, Artificial Sequence
  source: /note="Description of Artificial Sequence: Synthetic peptide"
WWDDK

SEQ ID NO: 950 - protein, 10 aa, Artificial Sequence
  source: /note="Description of Artificial Sequence: Synthetic peptide"
SMITNWYFDV

SEQ ID NO: 951 - protein, 120 aa, Artificial Sequence; identical to SEQ ID NO: 55
  source: /note="Description of Artificial Sequence: Synthetic polypeptide"

SEQ ID NO: 952 - protein, 450 aa, Artificial Sequence; identical to SEQ ID NO: 56
  source: /note="Description of Artificial Sequence: Synthetic polypeptide"

SEQ ID NO: 953 - protein, 10 aa, Artificial Sequence
  source: /note="Description of Artificial Sequence: Synthetic peptide"
KAQLSVGYMH

SEQ ID NO: 954 - protein, 7 aa, Artificial Sequence
  source: /note="Description of Artificial Sequence: Synthetic peptide"
DTSKLAS

SEQ ID NO: 955 - protein, 150 aa, Artificial Sequence
  source: /note="Description of Artificial Sequence: Synthetic polypeptide"
FQGSGSHTLPVRLLRPSDDVQKIVEELQSLSKMLLKDVEEEKGVLVSQNYTLPCLSPDAQPPNNIHSPAIRAYLKTIRQLDNKSVIDEIIEHLDKLIFQDAPETNISVPTDTHECKRFILTISQQFSECMDLALKSLTSGAQQATTYPFT

SEQ ID NO: 956 - protein, 6 aa, Artificial Sequence
  source: /note="Description of Artificial Sequence: Synthetic peptide"
QLSVGY

SEQ ID NO: 957 - protein, 3 aa, Artificial Sequence
  source: /note="Description of Artificial Sequence: Synthetic peptide"
DTS

SEQ ID NO: 958 - protein, 147 aa, Artificial Sequence
  source: /note="Description of Artificial Sequence: Synthetic polypeptide"
GSGSHTLPVRLLRPSDDVQKIVEELQSLSKMLLKDVEEEKGVLVSQNYTLPCLSPDAQPPNNIHSPAIRAYLKTIRQLDNKSVIDEIIEHLDKLIFQDAPETNISVPTDTHECKRFILTISQQFSECMDLALKSLTSGAQQATTYPF

SEQ ID NO: 959 - protein, 247 aa, Artificial Sequence
  source: /note="Description of Artificial Sequence: Synthetic polypeptide"
DIQMTQSPSTLSASVGDRVTITCKAQLSVGYMHWYQQKPGKAPKLLIYDTSKLASGVPSRFSGSGSGTEFTLTISSLQPDDFATYYCFQGSGSHTLPVRLLRPSDDVQKIVEELQSLSKMLLKDVEEEKGVLVSQNYTLPCLSPDAQPPNNIHSPAIRAYLKTIRQLDNKSVIDEIIEHLDKLIFQDAPETNISVPTDTHECKRFILTISQQFSECMDLALKSLTSGAQQATTYPFTFGGGTKLEIK

SEQ ID NO: 960 - protein, 354 aa, Artificial Sequence
  source: /note="Description of Artificial Sequence: Synthetic polypeptide"
DIQMTQSPSTLSASVGDRVTITCKAQLSVGYMHWYQQKPGKAPKLLIYDTSKLASGVPSRFSGSGSGTEFTLTISSLQPDDFATYYCFQGSGSHTLPVRLLRPSDDVQKIVEELQSLSKMLLKDVEEEKGVLVSQNYTLPCLSPDAQPPNNIHSPAIRAYLKTIRQLDNKSVIDEIIEHLDKLIFQDAPETNISVPTDTHECKRFILTISQQFSECMDLALKSLTSGAQQATTYPFTFGGGTKLEIKRTVAAPSVFIFPPSDEQLKSGTASVVCLLNNFYPREAKVQWKVDNALQSGNSQESVTEQDSKDSTYSLSSTLTLSKADYEKHKVYACEVTHQGLSSPVTKSFNRGEC

SEQ ID NO: 961 - protein, 462 aa, Artificial Sequence
  source: /note="Description of Artificial Sequence: Synthetic polypeptide"
EVSEYCSHMIGSGHLQSLQRLIDSQMETSCQITFEFVDQEQLKDPVCYLKKAFLLVQDIMEDTMRFRDNTPNAIAIVQLQELSLRLKSCFTKDYEEHDKACVRTFYETPLQLLEKVKNVFNETKNLLDKDWNIFSKNCNNSFAECSSQDVVTKPDCNCLYPKAIPSSDPASVSPHQPLAPSMAPVAGLTWEDSEGTEGSSLLPGEQPLHTVDPGSAKQRPPRSTCQSFEPPETPVVKDSTIGGSPQPRPSVGAFNPGMEDILDSAMGTNWVPEEASGEASEIPVPQGTELSPSRPGGGSMQTEPARPSNFLSASSPLPASAKGQQPADVTGTALPRVGPVRPTGQDWNHTPQKTDHPSALLRDPPEPGSPRISSLRPQGLSNPSTLSAQPQLSRSHSSGSVLPLGELEGRRSTRDRRSPAEPEGGPASEGAARPLPRFNSVPLTDTGHERQSEGSSSPQLQE

SEQ ID NO: 962 - protein, 16 aa, Artificial Sequence
  source: /note="Description of Artificial Sequence: Synthetic peptide"
DIWWDDKKDYNPSLKS

SEQ ID NO: 963 - protein, 10 aa, Artificial Sequence
  source: /note="Description of Artificial Sequence: Synthetic peptide"
SMITNWYFDV

SEQ ID NO: 964 - protein, 471 aa, Artificial Sequence
  source: /note="Description of Artificial Sequence: Synthetic polypeptide"
GFSLEVSEYCSHMIGSGHLQSLQRLIDSQMETSCQITFEFVDQEQLKDPVCYLKKAFLLVQDIMEDTMRFRDNTPNAIAIVQLQELSLRLKSCFTKDYEEHDKACVRTFYETPLQLLEKVKNVFNETKNLLDKDWNIFSKNCNNSFAECSSQDVVTKPDCNCLYPKAIPSSDPASVSPHQPLAPSMAPVAGLTWEDSEGTEGSSLLPGEQPLHTVDPGSAKQRPPRSTCQSFEPPETPVVKDSTIGGSPQPRPSVGAFNPGMEDILDSAMGTNWVPEEASGEASEIPVPQGTELSPSRPGGGSMQTEPARPSNFLSASSPLPASAKGQQPADVTGTALPRVGPVRPTGQDWNHTPQKTDHPSALLRDPPEPGSPRISSLRPQGLSNPSTLSAQPQLSRSHSSGSVLPLGELEGRRSTRDRRSPAEPEGGPASEGAARPLPRFNSVPLTDTGHERQSEGSSSPQLQESTSGM

SEQ ID NO: 965 - protein, 5 aa, Artificial Sequence
  source: /note="Description of Artificial Sequence: Synthetic peptide"
WWDDK

SEQ ID NO: 966 - protein, 10 aa, Artificial Sequence
  source: /note="Description of Artificial Sequence: Synthetic peptide"
SMITNWYFDV

SEQ ID NO: 967 - protein, 582 aa, Artificial Sequence
  source: /note="Description of Artificial Sequence: Synthetic polypeptide"
QVTLRESGPALVKPTQTLTLTCTFSGFSLEVSEYCSHMIGSGHLQSLQRLIDSQMETSCQITFEFVDQEQLKDPVCYLKKAFLLVQDIMEDTMRFRDNTPNAIAIVQLQELSLRLKSCFTKDYEEHDKACVRTFYETPLQLLEKVKNVFNETKNLLDKDWNIFSKNCNNSFAECSSQDVVTKPDCNCLYPKAIPSSDPASVSPHQPLAPSMAPVAGLTWEDSEGTEGSSLLPGEQPLHTVDPGSAKQRPPRSTCQSFEPPETPVVKDSTIGGSPQPRPSVGAFNPGMEDILDSAMGTNWVPEEASGEASEIPVPQGTELSPSRPGGGSMQTEPARPSNFLSASSPLPASAKGQQPADVTGTALPRVGPVRPTGQDWNHTPQKTDHPSALLRDPPEPGSPRISSLRPQGLSNPSTLSAQPQLSRSHSSGSVLPLGELEGRRSTRDRRSPAEPEGGPASEGAARPLPRFNSVPLTDTGHERQSEGSSSPQLQESTSGMSVGWIRQPPGKALEWLADIWWDDKKDYNPSLKSRLTISKDTSKNQVVLKVTNMDPADTATYYCARSMITNWYFDVWGAGTTVTVSS

SEQ ID NO: 968 - protein, 912 aa, Artificial Sequence
  source: /note="Description of Artificial Sequence: Synthetic polypeptide"
QVTLRESGPALVKPTQTLTLTCTFSGFSLEVSEYCSHMIGSGHLQSLQRLIDSQMETSCQITFEFVDQEQLKDPVCYLKKAFLLVQDIMEDTMRFRDNTPNAIAIVQLQELSLRLKSCFTKDYEEHDKACVRTFYETPLQLLEKVKNVFNETKNLLDKDWNIFSKNCNNSFAECSSQDVVTKPDCNCLYPKAIPSSDPASVSPHQPLAPSMAPVAGLTWEDSEGTEGSSLLPGEQPLHTVDPGSAKQRPPRSTCQSFEPPETPVVKDSTIGGSPQPRPSVGAFNPGMEDILDSAMGTNWVPEEASGEASEIPVPQGTELSPSRPGGGSMQTEPARPSNFLSASSPLPASAKGQQPADVTGTALPRVGPVRPTGQDWNHTPQKTDHPSALLRDPPEPGSPRISSLRPQGLSNPSTLSAQPQLSRSHSSGSVLPLGELEGRRSTRDRRSPAEPEGGPASEGAARPLPRFNSVPLTDTGHERQSEGSSSPQLQESTSGMSVGWIRQPPGKALEWLADIWWDDKKDYNPSLKSRLTISKDTSKNQVVLKVTNMDPADTATYYCARSMITNWYFDVWGAGTTVTVSSASTKGPSVFPLAPSSKSTSGGTAALGCLVKDYFPEPVTVSWNSGALTSGVHTFPAVLQSSGLYSLSSVVTVPSSSLGTQTYICNVNHKPSNTKVDKRVEPKSCDKTHTCPPCPAPELLGGPSVFLFPPKPKDTLMISRTPEVTCVVVAVSHEDPEVKFNWYVDGVEVHNAKTKPREEQYNSTYRVVSVLTVLHQDWLNGKEYKCKVSNKALAAPIEKTISKAKGQPREPQVYTLPPSREEMTKNQVSLTCLVKGFYPSDIAVEWESNGQPENNYKTTPPVLDSDGSFFLYSKLTVDKSRWQQGNVFSCSVMHEALHNHYTQKSLSLSPGK

SEQ ID NO: 969 - protein, 10 aa, Artificial Sequence
  source: /note="Description of Artificial Sequence: Synthetic peptide"
KAQLSVGYMH

SEQ ID NO: 970 - protein, 7 aa, Artificial Sequence
  source: /note="Description of Artificial Sequence: Synthetic peptide"
DTSKLAS

SEQ ID NO: 971 - protein, 9 aa, Artificial Sequence
  source: /note="Description of Artificial Sequence: Synthetic peptide"
FQGSGYPFT

SEQ ID NO: 972 - protein, 6 aa, Artificial Sequence
  source: /note="Description of Artificial Sequence: Synthetic peptide"
QLSVGY

SEQ ID NO: 973 - protein, 3 aa, Artificial Sequence
  source: /note="Description of Artificial Sequence: Synthetic peptide"
DTS

SEQ ID NO: 974 - protein, 6 aa, Artificial Sequence
  source: /note="Description of Artificial Sequence: Synthetic peptide"
GSGYPF

SEQ ID NO: 975 - protein, 106 aa, Artificial Sequence; identical to SEQ ID NO: 15
  source: /note="Description of Artificial Sequence: Synthetic polypeptide"

SEQ ID NO: 976 - protein, 213 aa, Artificial Sequence; identical to SEQ ID NO: 16
  source: /note="Description of Artificial Sequence: Synthetic polypeptide"

SEQ ID NO: 977 - protein, 7 aa, Artificial Sequence
  source: /note="Description of Artificial Sequence: Synthetic peptide"
TSGMSVG

SEQ ID NO: 978 - protein, 478 aa, Artificial Sequence
  source: /note="Description of Artificial Sequence: Synthetic polypeptide"
DIWWDEVSEYCSHMIGSGHLQSLQRLIDSQMETSCQITFEFVDQEQLKDPVCYLKKAFLLVQDIMEDTMRFRDNTPNAIAIVQLQELSLRLKSCFTKDYEEHDKACVRTFYETPLQLLEKVKNVFNETKNLLDKDWNIFSKNCNNSFAECSSQDVVTKPDCNCLYPKAIPSSDPASVSPHQPLAPSMAPVAGLTWEDSEGTEGSSLLPGEQPLHTVDPGSAKQRPPRSTCQSFEPPETPVVKDSTIGGSPQPRPSVGAFNPGMEDILDSAMGTNWVPEEASGEASEIPVPQGTELSPSRPGGGSMQTEPARPSNFLSASSPLPASAKGQQPADVTGTALPRVGPVRPTGQDWNHTPQKTDHPSALLRDPPEPGSPRISSLRPQGLSNPSTLSAQPQLSRSHSSGSVLPLGELEGRRSTRDRRSPAEPEGGPASEGAARPLPRFNSVPLTDTGHERQSEGSSSPQLQEDKKDYNPSLKS

SEQ ID NO: 979 - protein, 10 aa, Artificial Sequence
  source: /note="Description of Artificial Sequence: Synthetic peptide"
SMITNWYFDV

SEQ ID NO: 980 - protein, 9 aa, Artificial Sequence
  source: /note="Description of Artificial Sequence: Synthetic peptide"
GFSLSTSGM

SEQ ID NO: 981 - protein, 467 aa, Artificial Sequence
  source: /note="Description of Artificial Sequence: Synthetic polypeptide"
WWDEVSEYCSHMIGSGHLQSLQRLIDSQMETSCQITFEFVDQEQLKDPVCYLKKAFLLVQDIMEDTMRFRDNTPNAIAIVQLQELSLRLKSCFTKDYEEHDKACVRTFYETPLQLLEKVKNVFNETKNLLDKDWNIFSKNCNNSFAECSSQDVVTKPDCNCLYPKAIPSSDPASVSPHQPLAPSMAPVAGLTWEDSEGTEGSSLLPGEQPLHTVDPGSAKQRPPRSTCQSFEPPETPVVKDSTIGGSPQPRPSVGAFNPGMEDILDSAMGTNWVPEEASGEASEIPVPQGTELSPSRPGGGSMQTEPARPSNFLSASSPLPASAKGQQPADVTGTALPRVGPVRPTGQDWNHTPQKTDHPSALLRDPPEPGSPRISSLRPQGLSNPSTLSAQPQLSRSHSSGSVLPLGELEGRRSTRDRRSPAEPEGGPASEGAARPLPRFNSVPLTDTGHERQSEGSSSPQLQEDK

SEQ ID NO: 982 - protein, 10 aa, Artificial Sequence
  source: /note="Description of Artificial Sequence: Synthetic peptide"
SMITNWYFDV

SEQ ID NO: 983 - protein, 582 aa, Artificial Sequence
  source: /note="Description of Artificial Sequence: Synthetic polypeptide"
QVTLRESGPALVKPTQTLTLTCTFSGFSLSTSGMSVGWIRQPPGKALEWLADIWWDEVSEYCSHMIGSGHLQSLQRLIDSQMETSCQITFEFVDQEQLKDPVCYLKKAFLLVQDIMEDTMRFRDNTPNAIAIVQLQELSLRLKSCFTKDYEEHDKACVRTFYETPLQLLEKVKNVFNETKNLLDKDWNIFSKNCNNSFAECSSQDVVTKPDCNCLYPKAIPSSDPASVSPHQPLAPSMAPVAGLTWEDSEGTEGSSLLPGEQPLHTVDPGSAKQRPPRSTCQSFEPPETPVVKDSTIGGSPQPRPSVGAFNPGMEDILDSAMGTNWVPEEASGEASEIPVPQGTELSPSRPGGGSMQTEPARPSNFLSASSPLPASAKGQQPADVTGTALPRVGPVRPTGQDWNHTPQKTDHPSALLRDPPEPGSPRISSLRPQGLSNPSTLSAQPQLSRSHSSGSVLPLGELEGRRSTRDRRSPAEPEGGPASEGAARPLPRFNSVPLTDTGHERQSEGSSSPQLQEDKKDYNPSLKSRLTISKDTSANQVVLKVTNMDPADTATYYCARSMITNWYFDVWGAGTTVTVSS

SEQ ID NO: 984 - protein, 912 aa, Artificial Sequence
  source: /note="Description of Artificial Sequence: Synthetic polypeptide"
QVTLRESGPALVKPTQTLTLTCTFSGFSLSTSGMSVGWIRQPPGKALEWLADIWWDEVSEYCSHMIGSGHLQSLQRLIDSQMETSCQITFEFVDQEQLKDPVCYLKKAFLLVQDIMEDTMRFRDNTPNAIAIVQLQELSLRLKSCFTKDYEEHDKACVRTFYETPLQLLEKVKNVFNETKNLLDKDWNIFSKNCNNSFAECSSQDVVTKPDCNCLYPKAIPSSDPASVSPHQPLAPSMAPVAGLTWEDSEGTEGSSLLPGEQPLHTVDPGSAKQRPPRSTCQSFEPPETPVVKDSTIGGSPQPRPSVGAFNPGMEDILDSAMGTNWVPEEASGEASEIPVPQGTELSPSRPGGGSMQTEPARPSNFLSASSPLPASAKGQQPADVTGTALPRVGPVRPTGQDWNHTPQKTDHPSALLRDPPEPGSPRISSLRPQGLSNPSTLSAQPQLSRSHSSGSVLPLGELEGRRSTRDRRSPAEPEGGPASEGAARPLPRFNSVPLTDTGHERQSEGSSSPQLQEDKKDYNPSLKSRLTISKDTSANQVVLKVTNMDPADTATYYCARSMITNWYFDVWGAGTTVTVSSASTKGPSVFPLAPSSKSTSGGTAALGCLVKDYFPEPVTVSWNSGALTSGVHTFPAVLQSSGLYSLSSVVTVPSSSLGTQTYICNVNHKPSNTKVDKRVEPKSCDKTHTCPPCPAPELLGGPSVFLFPPKPKDTLMISRTPEVTCVVVAVSHEDPEVKFNWYVDGVEVHNAKTKPREEQYNSTYRVVSVLTVLHQDWLNGKEYKCKVSNKALAAPIEKTISKAKGQPREPQVYTLPPSREEMTKNQVSLTCLVKGFYPSDIAVEWESNGQPENNYKTTPPVLDSDGSFFLYSKLTVDKSRWQQGNVFSCSVMHEALHNHYTQKSLSLSPGK

SEQ ID NO: 985 - protein, 10 aa, Artificial Sequence
  source: /note="Description of Artificial Sequence: Synthetic peptide"
KAQLSVGYMH

SEQ ID NO: 986 - protein, 7 aa, Artificial Sequence
  source: /note="Description of Artificial Sequence: Synthetic peptide"
DTSKLAS

SEQ ID NO: 987 - protein, 9 aa, Artificial Sequence
  source: /note="Description of Artificial Sequence: Synthetic peptide"
FQGSGYPFT

SEQ ID NO: 988 - protein, 6 aa, Artificial Sequence
  source: /note="Description of Artificial Sequence: Synthetic peptide"
QLSVGY

SEQ ID NO: 989 - protein, 3 aa, Artificial Sequence
  source: /note="Description of Artificial Sequence: Synthetic peptide"
DTS

SEQ ID NO: 990 - protein, 6 aa, Artificial Sequence
  source: /note="Description of Artificial Sequence: Synthetic peptide"
GSGYPF

SEQ ID NO: 991 - protein, 106 aa, Artificial Sequence; identical to SEQ ID NO: 15
  source: /note="Description of Artificial Sequence: Synthetic polypeptide"

SEQ ID NO: 992 - protein, 213 aa, Artificial Sequence; identical to SEQ ID NO: 16
  source: /note="Description of Artificial Sequence: Synthetic polypeptide"

SEQ ID NO: 993 - protein, 7 aa, Artificial Sequence
  source: /note="Description of Artificial Sequence: Synthetic peptide"
TSGMSVG

SEQ ID NO: 994 - protein, 16 aa, Artificial Sequence
  source: /note="Description of Artificial Sequence: Synthetic peptide"
DIWWDDKKDYNPSLKS

SEQ ID NO: 995 - protein, 472 aa, Artificial Sequence
  source: /note="Description of Artificial Sequence: Synthetic polypeptide"
SMITEVSEYCSHMIGSGHLQSLQRLIDSQMETSCQITFEFVDQEQLKDPVCYLKKAFLLVQDIMEDTMRFRDNTPNAIAIVQLQELSLRLKSCFTKDYEEHDKACVRTFYETPLQLLEKVKNVFNETKNLLDKDWNIFSKNCNNSFAECSSQDVVTKPDCNCLYPKAIPSSDPASVSPHQPLAPSMAPVAGLTWEDSEGTEGSSLLPGEQPLHTVDPGSAKQRPPRSTCQSFEPPETPVVKDSTIGGSPQPRPSVGAFNPGMEDILDSAMGTNWVPEEASGEASEIPVPQGTELSPSRPGGGSMQTEPARPSNFLSASSPLPASAKGQQPADVTGTALPRVGPVRPTGQDWNHTPQKTDHPSALLRDPPEPGSPRISSLRPQGLSNPSTLSAQPQLSRSHSSGSVLPLGELEGRRSTRDRRSPAEPEGGPASEGAARPLPRFNSVPLTDTGHERQSEGSSSPQLQENWYFDV

SEQ ID NO: 996 - protein, 9 aa, Artificial Sequence
  source: /note="Description of Artificial Sequence: Synthetic peptide"
GFSLSTSGM

SEQ ID NO: 997 - protein, 5 aa, Artificial Sequence
  source: /note="Description of Artificial Sequence: Synthetic peptide"
WWDDK

SEQ ID NO: 998 - protein, 472 aa, Artificial Sequence; identical to SEQ ID NO: 995
  source: /note="Description of Artificial Sequence: Synthetic polypeptide"

SEQ ID NO: 999 - protein, 582 aa, Artificial Sequence
  source: /note="Description of Artificial Sequence: Synthetic polypeptide"
QVTLRESGPALVKPTQTLTLTCTFSGFSLSTSGMSVGWIRQPPGKALEWLADIWWDDKKDYNPSLKSRLTISKDTSKNQVVLKVTNMDPADTATYYCARSMITEVSEYCSHMIGSGHLQSLQRLIDSQMETSCQITFEFVDQEQLKDPVCYLKKAFLLVQDIMEDTMRFRDNTPNAIAIVQLQELSLRLKSCFTKDYEEHDKACVRTFYETPLQLLEKVKNVFNETKNLLDKDWNIFSKNCNNSFAECSSQDVVTKPDCNCLYPKAIPSSDPASVSPHQPLAPSMAPVAGLTWEDSEGTEGSSLLPGEQPLHTVDPGSAKQRPPRSTCQSFEPPETPVVKDSTIGGSPQPRPSVGAFNPGMEDILDSAMGTNWVPEEASGEASEIPVPQGTELSPSRPGGGSMQTEPARPSNFLSASSPLPASAKGQQPADVTGTALPRVGPVRPTGQDWNHTPQKTDHPSALLRDPPEPGSPRISSLRPQGLSNPSTLSAQPQLSRSHSSGSVLPLGELEGRRSTRDRRSPAEPEGGPASEGAARPLPRFNSVPLTDTGHERQSEGSSSPQLQENWYFDVWGAGTTVTVSS

SEQ ID NO: 1000 - protein, 912 aa, Artificial Sequence
  source: /note="Description of Artificial Sequence: Synthetic polypeptide"
QVTLRESGPALVKPTQTLTLTCTFSGFSLSTSGMSVGWIRQPPGKALEWLADIWWDDKKDYNPSLKSRLTISKDTSKNQVVLKVTNMDPADTATYYCARSMITEVSEYCSHMIGSGHLQSLQRLIDSQMETSCQITFEFVDQEQLKDPVCYLKKAFLLVQDIMEDTMRFRDNTPNAIAIVQLQELSLRLKSCFTKDYEEHDKACVRTFYETPLQLLEKVKNVFNETKNLLDKDWNIFSKNCNNSFAECSSQDVVTKPDCNCLYPKAIPSSDPASVSPHQPLAPSMAPVAGLTWEDSEGTEGSSLLPGEQPLHTVDPGSAKQRPPRSTCQSFEPPETPVVKDSTIGGSPQPRPSVGAFNPGMEDILDSAMGTNWVPEEASGEASEIPVPQGTELSPSRPGGGSMQTEPARPSNFLSASSPLPASAKGQQPADVTGTALPRVGPVRPTGQDWNHTPQKTDHPSALLRDPPEPGSPRISSLRPQGLSNPSTLSAQPQLSRSHSSGSVLPLGELEGRRSTRDRRSPAEPEGGPASEGAARPLPRFNSVPLTDTGHERQSEGSSSPQLQENWYFDVWGAGTTVTVSSASTKGPSVFPLAPSSKSTSGGTAALGCLVKDYFPEPVTVSWNSGALTSGVHTFPAVLQSSGLYSLSSVVTVPSSSLGTQTYICNVNHKPSNTKVDKRVEPKSCDKTHTCPPCPAPELLGGPSVFLFPPKPKDTLMISRTPEVTCVVVAVSHEDPEVKFNWYVDGVEVHNAKTKPREEQYNSTYRVVSVLTVLHQDWLNGKEYKCKVSNKALAAPIEKTISKAKGQPREPQVYTLPPSREEMTKNQVSLTCLVKGFYPSDIAVEWESNGQPENNYKTTPPVLDSDGSFFLYSKLTVDKSRWQQGNVFSCSVMHEALHNHYTQKSLSLSPGK

SEQ ID NO: 1001 - protein, 10 aa, Artificial Sequence
  source: /note="Description of Artificial Sequence: Synthetic peptide"
KAQLSVGYMH

SEQ ID NO: 1002 - protein, 7 aa, Artificial Sequence
  source: /note="Description of Artificial Sequence: Synthetic peptide"
DTSKLAS

SEQ ID NO: 1003 - protein, 9 aa, Artificial Sequence
  source: /note="Description of Artificial Sequence: Synthetic peptide"
FQGSGYPFT

SEQ ID NO: 1004 - protein, 6 aa, Artificial Sequence
  source: /note="Description of Artificial Sequence: Synthetic peptide"
QLSVGY

SEQ ID NO: 1005 - protein, 3 aa, Artificial Sequence
  source: /note="Description of Artificial Sequence: Synthetic peptide"
DTS

SEQ ID NO: 1006 - protein, 6 aa, Artificial Sequence
  source: /note="Description of Artificial Sequence: Synthetic peptide"
GSGYPF

SEQ ID NO: 1007 - protein, 106 aa, Artificial Sequence; identical to SEQ ID NO: 15
  source: /note="Description of Artificial Sequence: Synthetic polypeptide"

SEQ ID NO: 1008 - protein, 213 aa, Artificial Sequence; identical to SEQ ID NO: 16
  source: /note="Description of Artificial Sequence: Synthetic polypeptide"

SEQ ID NO: 1009 - protein, 7 aa, Artificial Sequence
  source: /note="Description of Artificial Sequence: Synthetic peptide"
TSGMSVG

SEQ ID NO: 1010 - protein, 15 aa, Artificial Sequence
  source: /note="Description of Artificial Sequence: Synthetic peptide"
DIWWDDKKDYNPSLK

SEQ ID NO: 1011 - protein, 10 aa, Artificial Sequence
  source: /note="Description of Artificial Sequence: Synthetic peptide"
SMITNWYFDV

SEQ ID NO: 1012 - protein, 9 aa, Artificial Sequence
  source: /note="Description of Artificial Sequence: Synthetic peptide"
GFSLSTSGM

SEQ ID NO: 1013 - protein, 5 aa, Artificial Sequence
  source: /note="Description of Artificial Sequence: Synthetic peptide"
WWDDK

SEQ ID NO: 1014 - protein, 10 aa, Artificial Sequence
  source: /note="Description of Artificial Sequence: Synthetic peptide"
SMITNWYFDV

SEQ ID NO: 1015 - protein, 120 aa, Artificial Sequence; identical to SEQ ID NO: 55
  source: /note="Description of Artificial Sequence: Synthetic polypeptide"

SEQ ID NO: 1016 - protein, 450 aa, Artificial Sequence; identical to SEQ ID NO: 56
  source: /note="Description of Artificial Sequence: Synthetic polypeptide"

SEQ ID NO: 1017 - protein, 472 aa, Artificial Sequence
  source: /note="Description of Artificial Sequence: Synthetic polypeptide"
KAQLSEVSEYCSHMIGSGHLQSLQRLIDSQMETSCQITFEFVDQEQLKDPVCYLKKAFLLVQDIMEDTMRFRDNTPNAIAIVQLQELSLRLKSCFTKDYEEHDKACVRTFYETPLQLLEKVKNVFNETKNLLDKDWNIFSKNCNNSFAECSSQDVVTKPDCNCLYPKAIPSSDPASVSPHQPLAPSMAPVAGLTWEDSEGTEGSSLLPGEQPLHTVDPGSAKQRPPRSTCQSFEPPETPVVKDSTIGGSPQPRPSVGAFNPGMEDILDSAMGTNWVPEEASGEASEIPVPQGTELSPSRPGGGSMQTEPARPSNFLSASSPLPASAKGQQPADVTGTALPRVGPVRPTGQDWNHTPQKTDHPSALLRDPPEPGSPRISSLRPQGLSNPSTLSAQPQLSRSHSSGSVLPLGELEGRRSTRDRRSPAEPEGGPASEGAARPLPRFNSVPLTDTGHERQSEGSSSPQLQEVGYMH

SEQ ID NO: 1018 - protein, 7 aa, Artificial Sequence
  source: /note="Description of Artificial Sequence: Synthetic peptide"
DTSKLAS

SEQ ID NO: 1019 - protein, 9 aa, Artificial Sequence
  source: /note="Description of Artificial Sequence: Synthetic peptide"
FQGSGYPFT

SEQ ID NO: 1020 - protein, 468 aa, Artificial Sequence
  source: /note="Description of Artificial Sequence: Synthetic polypeptide"
QLSEVSEYCSHMIGSGHLQSLQRLIDSQMETSCQITFEFVDQEQLKDPVCYLKKAFLLVQDIMEDTMRFRDNTPNAIAIVQLQELSLRLKSCFTKDYEEHDKACVRTFYETPLQLLEKVKNVFNETKNLLDKDWNIFSKNCNNSFAECSSQDVVTKPDCNCLYPKAIPSSDPASVSPHQPLAPSMAPVAGLTWEDSEGTEGSSLLPGEQPLHTVDPGSAKQRPPRSTCQSFEPPETPVVKDSTIGGSPQPRPSVGAFNPGMEDILDSAMGTNWVPEEASGEASEIPVPQGTELSPSRPGGGSMQTEPARPSNFLSASSPLPASAKGQQPADVTGTALPRVGPVRPTGQDWNHTPQKTDHPSALLRDPPEPGSPRISSLRPQGLSNPSTLSAQPQLSRSHSSGSVLPLGELEGRRSTRDRRSPAEPEGGPASEGAARPLPRFNSVPLTDTGHERQSEGSSSPQLQEVGY

SEQ ID NO: 1021 - protein, 3 aa, Artificial Sequence
  source: /note="Description of Artificial Sequence: Synthetic peptide"
DTS

SEQ ID NO: 1022 - protein, 6 aa, Artificial Sequence
  source: /note="Description of Artificial Sequence: Synthetic peptide"
GSGYPF

SEQ ID NO: 1023 - protein, 568 aa, Artificial Sequence
  source: /note="Description of Artificial Sequence: Synthetic polypeptide"
DIQMTQSPSTLSASVGDRVTITCKAQLSEVSEYCSHMIGSGHLQSLQRLIDSQMETSCQITFEFVDQEQLKDPVCYLKKAFLLVQDIMEDTMRFRDNTPNAIAIVQLQELSLRLKSCFTKDYEEHDKACVRTFYETPLQLLEKVKNVFNETKNLLDKDWNIFSKNCNNSFAECSSQDVVTKPDCNCLYPKAIPSSDPASVSPHQPLAPSMAPVAGLTWEDSEGTEGSSLLPGEQPLHTVDPGSAKQRPPRSTCQSFEPPETPVVKDSTIGGSPQPRPSVGAFNPGMEDILDSAMGTNWVPEEASGEASEIPVPQGTELSPSRPGGGSMQTEPARPSNFLSASSPLPASAKGQQPADVTGTALPRVGPVRPTGQDWNHTPQKTDHPSALLRDPPEPGSPRISSLRPQGLSNPSTLSAQPQLSRSHSSGSVLPLGELEGRRSTRDRRSPAEPEGGPASEGAARPLPRFNSVPLTDTGHERQSEGSSSPQLQEVGYMHWYQQKPGKAPKLLIYDTSKLASGVPSRFSGSGSGTEFTLTISSLQPDDFATYYCFQGSGYPFTFGGGTKLEIK

SEQ ID NO: 1024 - protein, 675 aa, Artificial Sequence
  source: /note="Description of Artificial Sequence: Synthetic polypeptide"
DIQMTQSPSTLSASVGDRVTITCKAQLSEVSEYCSHMIGSGHLQSLQRLIDSQMETSCQITFEFVDQEQLKDPVCYLKKAFLLVQDIMEDTMRFRDNTPNAIAIVQLQELSLRLKSCFTKDYEEHDKACVRTFYETPLQLLEKVKNVFNETKNLLDKDWNIFSKNCNNSFAECSSQDVVTKPDCNCLYPKAIPSSDPASVSPHQPLAPSMAPVAGLTWEDSEGTEGSSLLPGEQPLHTVDPGSAKQRPPRSTCQSFEPPETPVVKDSTIGGSPQPRPSVGAFNPGMEDILDSAMGTNWVPEEASGEASEIPVPQGTELSPSRPGGGSMQTEPARPSNFLSASSPLPASAKGQQPADVTGTALPRVGPVRPTGQDWNHTPQKTDHPSALLRDPPEPGSPRISSLRPQGLSNPSTLSAQPQLSRSHSSGSVLPLGELEGRRSTRDRRSPAEPEGGPASEGAARPLPRFNSVPLTDTGHERQSEGSSSPQLQEVGYMHWYQQKPGKAPKLLIYDTSKLASGVPSRFSGSGSGTEFTLTISSLQPDDFATYYCFQGSGYPFTFGGGTKLEIKRTVAAPSVFIFPPSDEQLKSGTASVVCLLNNFYPREAKVQWKVDNALQSGNSQESVTEQDSKDSTYSLSSTLTLSKADYEKHKVYACEVTHQGLSSPVTKSFNRGEC

SEQ ID NO: 1025 - protein, 7 aa, Artificial Sequence
  source: /note="Description of Artificial Sequence: Synthetic peptide"
TSGMSVG

SEQ ID NO: 1026 - protein, 15 aa, Artificial Sequence
  source: /note="Description of Artificial Sequence: Synthetic peptide"
DIWWDDKKDYNPSLK

SEQ ID NO: 1027 - protein, 10 aa, Artificial Sequence
  source: /note="Description of Artificial Sequence: Synthetic peptide"
SMITNWYFDV

SEQ ID NO: 1028 - protein, 9 aa, Artificial Sequence
  source: /note="Description of Artificial Sequence: Synthetic peptide"
GFSLSTSGM

SEQ ID NO: 1029 - protein, 5 aa, Artificial Sequence
  source: /note="Description of Artificial Sequence: Synthetic peptide"
WWDDK

SEQ ID NO: 1030 - protein, 10 aa, Artificial Sequence
  source: /note="Description of Artificial Sequence: Synthetic peptide"
SMITNWYFDV

SEQ ID NO: 1031 - protein, 120 aa, Artificial Sequence; identical to SEQ ID NO: 55
  source: /note="Description of Artificial Sequence: Synthetic polypeptide"

SEQ ID NO: 1032 - protein, 450 aa, Artificial Sequence; identical to SEQ ID NO: 56
  source: /note="Description of Artificial Sequence: Synthetic polypeptide"

SEQ ID NO: 1033 - protein, 10 aa, Artificial Sequence
  source: /note="Description of Artificial Sequence: Synthetic peptide"
KAQLSVGYMH

SEQ ID NO: 1034 - protein, 469 aa, Artificial Sequence
  source: /note="Description of Artificial Sequence: Synthetic polypeptide"
DTEVSEYCSHMIGSGHLQSLQRLIDSQMETSCQITFEFVDQEQLKDPVCYLKKAFLLVQDIMEDTMRFRDNTPNAIAIVQLQELSLRLKSCFTKDYEEHDKACVRTFYETPLQLLEKVKNVFNETKNLLDKDWNIFSKNCNNSFAECSSQDVVTKPDCNCLYPKAIPSSDPASVSPHQPLAPSMAPVAGLTWEDSEGTEGSSLLPGEQPLHTVDPGSAKQRPPRSTCQSFEPPETPVVKDSTIGGSPQPRPSVGAFNPGMEDILDSAMGTNWVPEEASGEASEIPVPQGTELSPSRPGGGSMQTEPARPSNFLSASSPLPASAKGQQPADVTGTALPRVGPVRPTGQDWNHTPQKTDHPSALLRDPPEPGSPRISSLRPQGLSNPSTLSAQPQLSRSHSSGSVLPLGELEGRRSTRDRRSPAEPEGGPASEGAARPLPRFNSVPLTDTGHERQSEGSSSPQLQESKLAS

SEQ ID NO: 1035 - protein, 9 aa, Artificial Sequence
  source: /note="Description of Artificial Sequence: Synthetic peptide"
FQGSGYPFT

SEQ ID NO: 1036 - protein, 6 aa, Artificial Sequence
  source: /note="Description of Artificial Sequence: Synthetic peptide"
QLSVGY

SEQ ID NO: 1037 - protein, 465 aa, Artificial Sequence
  source: /note="Description of Artificial Sequence: Synthetic polypeptide"
DTEVSEYCSHMIGSGHLQSLQRLIDSQMETSCQITFEFVDQEQLKDPVCYLKKAFLLVQDIMEDTMRFRDNTPNAIAIVQLQELSLRLKSCFTKDYEEHDKACVRTFYETPLQLLEKVKNVFNETKNLLDKDWNIFSKNCNNSFAECSSQDVVTKPDCNCLYPKAIPSSDPASVSPHQPLAPSMAPVAGLTWEDSEGTEGSSLLPGEQPLHTVDPGSAKQRPPRSTCQSFEPPETPVVKDSTIGGSPQPRPSVGAFNPGMEDILDSAMGTNWVPEEASGEASEIPVPQGTELSPSRPGGGSMQTEPARPSNFLSASSPLPASAKGQQPADVTGTALPRVGPVRPTGQDWNHTPQKTDHPSALLRDPPEPGSPRISSLRPQGLSNPSTLSAQPQLSRSHSSGSVLPLGELEGRRSTRDRRSPAEPEGGPASEGAARPLPRFNSVPLTDTGHERQSEGSSSPQLQES

SEQ ID NO: 1038 - protein, 6 aa, Artificial Sequence
  source: /note="Description of Artificial Sequence: Synthetic peptide"
GSGYPF

SEQ ID NO: 1039 - protein, 568 aa, Artificial Sequence
  source: /note="Description of Artificial Sequence: Synthetic polypeptide"
DIQMTQSPSTLSASVGDRVTITCKAQLSVGYMHWYQQKPGKAPKLLIYDTEVSEYCSHMIGSGHLQSLQRLIDSQMETSCQITFEFVDQEQLKDPVCYLKKAFLLVQDIMEDTMRFRDNTPNAIAIVQLQELSLRLKSCFTKDYEEHDKACVRTFYETPLQLLEKVKNVFNETKNLLDKDWNIFSKNCNNSFAECSSQDVVTKPDCNCLYPKAIPSSDPASVSPHQPLAPSMAPVAGLTWEDSEGTEGSSLLPGEQPLHTVDPGSAKQRPPRSTCQSFEPPETPVVKDSTIGGSPQPRPSVGAFNPGMEDILDSAMGTNWVPEEASGEASEIPVPQGTELSPSRPGGGSMQTEPARPSNFLSASSPLPASAKGQQPADVTGTALPRVGPVRPTGQDWNHTPQKTDHPSALLRDPPEPGSPRISSLRPQGLSNPSTLSAQPQLSRSHSSGSVLPLGELEGRRSTRDRRSPAEPEGGPASEGAARPLPRFNSVPLTDTGHERQSEGSSSPQLQESKLASGVPSRFSGSGSGTEFTLTISSLQPDDFATYYCFQGSGYPFTFGGGTKLEIK

SEQ ID NO: 1040 - protein, 675 aa, Artificial Sequence
  source: /note="Description of Artificial Sequence: Synthetic polypeptide"
DIQMTQSPSTLSASVGDRVTITCKAQLSVGYMHWYQQKPGKAPKLLIYDTEVSEYCSHMIGSGHLQSLQRLIDSQMETSCQITFEFVDQEQLKDPVCYLKKAFLLVQDIMEDTMRFRDNTPNAIAIVQLQELSLRLKSCFTKDYEEHDKACVRTFYETPLQLLEKVKNVFNETKNLLDKDWNIFSKNCNNSFAECSSQDVVTKPDCNCLYPKAIPSSDPASVSPHQPLAPSMAPVAGLTWEDSEGTEGSSLLPGEQPLHTVDPGSAKQRPPRSTCQSFEPPETPVVKDSTIGGSPQPRPSVGAFNPGMEDILDSAMGTNWVPEEASGEASEIPVPQGTELSPSRPGGGSMQTEPARPSNFLSASSPLPASAKGQQPADVTGTALPRVGPVRPTGQDWNHTPQKTDHPSALLRDPPEPGSPRISSLRPQGLSNPSTLSAQPQLSRSHSSGSVLPLGELEGRRSTRDRRSPAEPEGGPASEGAARPLPRFNSVPLTDTGHERQSEGSSSPQLQESKLASGVPSRFSGSGSGTEFTLTISSLQPDDFATYYCFQGSGYPFTFGGGTKLEIKRTVAAPSVFIFPPSDEQLKSGTASVVCLLNNFYPREAKVQWKVDNALQSGNSQESVTEQDSKDSTYSLSSTLTLSKADYEKHKVYACEVTHQGLSSPVTKSFNRGEC

SEQ ID NO: 1041 - protein, 7 aa, Artificial Sequence
  source: /note="Description of Artificial Sequence: Synthetic peptide"
TSGMSVG

SEQ ID NO: 1042 - protein, 15 aa, Artificial Sequence
  source: /note="Description of Artificial Sequence: Synthetic peptide"
DIWWDDKKDYNPSLK

SEQ ID NO: 1043 - protein, 10 aa, Artificial Sequence
  source: /note="Description of Artificial Sequence: Synthetic peptide"
SMITNWYFDV

SEQ ID NO: 1044 - protein, 9 aa, Artificial Sequence
  source: /note="Description of Artificial Sequence: Synthetic peptide"
GFSLSTSGM

SEQ ID NO: 1045 - protein, 5 aa, Artificial Sequence
  source: /note="Description of Artificial Sequence: Synthetic peptide"
WWDDK

SEQ ID NO: 1046 - protein, 10 aa, Artificial Sequence
  source: /note="Description of Artificial Sequence: Synthetic peptide"
SMITNWYFDV

SEQ ID NO: 1047 - protein, 120 aa, Artificial Sequence; identical to SEQ ID NO: 55
  source: /note="Description of Artificial Sequence: Synthetic polypeptide"

SEQ ID NO: 1048 - protein, 450 aa, Artificial Sequence; identical to SEQ ID NO: 56
  source: /note="Description of Artificial Sequence: Synthetic polypeptide"

SEQ ID NO: 1049 - protein, 10 aa, Artificial Sequence
  source: /note="Description of Artificial Sequence: Synthetic peptide"
KAQLSVGYMH

SEQ ID NO: 1050 - protein, 7 aa, Artificial Sequence
  source: /note="Description of Artificial Sequence: Synthetic peptide"
DTSKLAS

SEQ ID NO: 1051 - protein, 471 aa, Artificial Sequence
  source: /note="Description of Artificial Sequence: Synthetic polypeptide"
FQGSGEVSEYCSHMIGSGHLQSLQRLIDSQMETSCQITFEFVDQEQLKDPVCYLKKAFLLVQDIMEDTMRFRDNTPNAIAIVQLQELSLRLKSCFTKDYEEHDKACVRTFYETPLQLLEKVKNVFNETKNLLDKDWNIFSKNCNNSFAECSSQDVVTKPDCNCLYPKAIPSSDPASVSPHQPLAPSMAPVAGLTWEDSEGTEGSSLLPGEQPLHTVDPGSAKQRPPRSTCQSFEPPETPVVKDSTIGGSPQPRPSVGAFNPGMEDILDSAMGTNWVPEEASGEASEIPVPQGTELSPSRPGGGSMQTEPARPSNFLSASSPLPASAKGQQPADVTGTALPRVGPVRPTGQDWNHTPQKTDHPSALLRDPPEPGSPRISSLRPQGLSNPSTLSAQPQLSRSHSSGSVLPLGELEGRRSTRDRRSPAEPEGGPASEGAARPLPRFNSVPLTDTGHERQSEGSSSPQLQEYPFT

SEQ ID NO: 1052 - protein, 6 aa, Artificial Sequence
  source: /note="Description of Artificial Sequence: Synthetic peptide"
QLSVGY

SEQ ID NO: 1053 - protein, 3 aa, Artificial Sequence
  source: /note="Description of Artificial Sequence: Synthetic peptide"
DTS

SEQ ID NO: 1054 - protein, 468 aa, Artificial Sequence
  source: /note="Description of Artificial Sequence: Synthetic polypeptide"
GSGEVSEYCSHMIGSGHLQSLQRLIDSQMETSCQITFEFVDQEQLKDPVCYLKKAFLLVQDIMEDTMRFRDNTPNAIAIVQLQELSLRLKSCFTKDYEEHDKACVRTFYETPLQLLEKVKNVFNETKNLLDKDWNIFSKNCNNSFAECSSQDVVTKPDCNCLYPKAIPSSDPASVSPHQPLAPSMAPVAGLTWEDSEGTEGSSLLPGEQPLHTVDPGSAKQRPPRSTCQSFEPPETPVVKDSTIGGSPQPRPSVGAFNPGMEDILDSAMGTNWVPEEASGEASEIPVPQGTELSPSRPGGGSMQTEPARPSNFLSASSPLPASAKGQQPADVTGTALPRVGPVRPTGQDWNHTPQKTDHPSALLRDPPEPGSPRISSLRPQGLSNPSTLSAQPQLSRSHSSGSVLPLGELEGRRSTRDRRSPAEPEGGPASEGAARPLPRFNSVPLTDTGHERQSEGSSSPQLQEYPF

SEQ ID NO: 1055 - protein, 568 aa, Artificial Sequence
  source: /note="Description of Artificial Sequence: Synthetic polypeptide"
DIQMTQSPSTLSASVGDRVTITCKAQLSVGYMHWYQQKPGKAPKLLIYDTSKLASGVPSRFSGSGSGTEFTLTISSLQPDDFATYYCFQGSGEVSEYCSHMIGSGHLQSLQRLIDSQMETSCQITFEFVDQEQLKDPVCYLKKAFLLVQDIMEDTMRFRDNTPNAIAIVQLQELSLRLKSCFTKDYEEHDKACVRTFYETPLQLLEKVKNVFNETKNLLDKDWNIFSKNCNNSFAECSSQDVVTKPDCNCLYPKAIPSSDPASVSPHQPLAPSMAPVAGLTWEDSEGTEGSSLLPGEQPLHTVDPGSAKQRPPRSTCQSFEPPETPVVKDSTIGGSPQPRPSVGAFNPGMEDILDSAMGTNWVPEEASGEASEIPVPQGTELSPSRPGGGSMQTEPARPSNFLSASSPLPASAKGQQPADVTGTALPRVGPVRPTGQDWNHTPQKTDHPSALLRDPPEPGSPRISSLRPQGLSNPSTLSAQPQLSRSHSSGSVLPLGELEGRRSTRDRRSPAEPEGGPASEGAARPLPRFNSVPLTDTGHERQSEGSSSPQLQEYPFTFGGGTKLEIK

SEQ ID NO: 1056 - protein, 675 aa, Artificial Sequence
  source: /note="Description of Artificial Sequence: Synthetic polypeptide"
DIQMTQSPSTLSASVGDRVTITCKAQLSVGYMHWYQQKPGKAPKLLIYDTSKLASGVPSRFSGSGSGTEFTLTISSLQPDDFATYYCFQGSGEVSEYCSHMIGSGHLQSLQRLIDSQMETSCQITFEFVDQEQLKDPVCYLKKAFLLVQDIMEDTMRFRDNTPNAIAIVQLQELSLRLKSCFTKDYEEHDKACVRTFYETPLQLLEKVKNVFNETKNLLDKDWNIFSKNCNNSFAECSSQDVVTKPDCNCLYPKAIPSSDPASVSPHQPLAPSMAPVAGLTWEDSEGTEGSSLLPGEQPLHTVDPGSAKQRPPRSTCQSFEPPETPVVKDSTIGGSPQPRPSVGAFNPGMEDILDSAMGTNWVPEEASGEASEIPVPQGTELSPSRPGGGSMQTEPARPSNFLSASSPLPASAKGQQPADVTGTALPRVGPVRPTGQDWNHTPQKTDHPSALLRDPPEPGSPRISSLRPQGLSNPSTLSAQPQLSRSHSSGSVLPLGELEGRRSTRDRRSPAEPEGGPASEGAARPLPRFNSVPLTDTGHERQSEGSSSPQLQEYPFTFGGGTKLEIKRTVAAPSVFIFPPSDEQLKSGTASVVCLLNNFYPREAKVQWKVDNALQSGNSQESVTEQDSKDSTYSLSSTLTLSKADYEKHKVYACEVTHQGLSSPVTKSFNRGEC

SEQ ID NO: 1057 - protein, 194 aa, Artificial Sequence
  source: /note="Description of Artificial Sequence: Synthetic polypeptide"
GICRNRVTNNVKDVTKLVANLPKDYMITLKYVPGMDVLPSHCWISEMVVQLSDSLTDLLDKFSNISEGLSNYSIIDKLVNIVDDLVECVKENSSKDLKKSFKSPEPRLFTPEEFFRIFNRSIDAFKDFVVASETSDCVVSSTLSPEKDSRVSVTKPFMLPPVAASSLRNDSSSSNRKAKNPPGDSSSTSGMSVG

SEQ ID NO: 1058 - protein, 16 aa, Artificial Sequence
  source: /note="Description of Artificial Sequence: Synthetic peptide"
DIWWDDKKDYNPSLKS

SEQ ID NO: 1059 - protein, 10 aa, Artificial Sequence
  source: /note="Description of Artificial Sequence: Synthetic peptide"
SMITNWYFDV

SEQ ID NO: 1060 - protein, 196 aa, Artificial Sequence
  source: /note="Description of Artificial Sequence: Synthetic polypeptide"
GFSLEGICRNRVTNNVKDVTKLVANLPKDYMITLKYVPGMDVLPSHCWISEMVVQLSDSLTDLLDKFSNISEGLSNYSIIDKLVNIVDDLVECVKENSSKDLKKSFKSPEPRLFTPEEFFRIFNRSIDAFKDFVVASETSDCVVSSTLSPEKDSRVSVTKPFMLPPVAASSLRNDSSSSNRKAKNPPGDSSSTSGM

SEQ ID NO: 1061 - protein, 5 aa, Artificial Sequence
  source: /note="Description of Artificial Sequence: Synthetic peptide"
WWDDK

SEQ ID NO: 1062 - protein, 10 aa, Artificial Sequence
  source: /note="Description of Artificial Sequence: Synthetic peptide"
SMITNWYFDV

SEQ ID NO: 1063 - protein, 307 aa, Artificial Sequence
  source: /note="Description of Artificial Sequence: Synthetic polypeptide"
QVTLRESGPALVKPTQTLTLTCTFSGFSLEGICRNRVTNNVKDVTKLVANLPKDYMITLKYVPGMDVLPSHCWISEMVVQLSDSLTDLLDKFSNISEGLSNYSIIDKLVNIVDDLVECVKENSSKDLKKSFKSPEPRLFTPEEFFRIFNRSIDAFKDFVVASETSDCVVSSTLSPEKDSRVSVTKPFMLPPVAASSLRNDSSSSNRKAKNPPGDSSSTSGMSVGWIRQPPGKALEWLADIWWDDKKDYNPSLKSRLTISKDTSKNQVVLKVTNMDPADTATYYCARSMITNWYFDVWGAGTTVTVSS

SEQ ID NO: 1064 - protein, 637 aa, Artificial Sequence
  source: /note="Description of Artificial Sequence: Synthetic polypeptide"
QVTLRESGPALVKPTQTLTLTCTFSGFSLEGICRNRVTNNVKDVTKLVANLPKDYMITLKYVPGMDVLPSHCWISEMVVQLSDSLTDLLDKFSNISEGLSNYSIIDKLVNIVDDLVECVKENSSKDLKKSFKSPEPRLFTPEEFFRIFNRSIDAFKDFVVASETSDCVVSSTLSPEKDSRVSVTKPFMLPPVAASSLRNDSSSSNRKAKNPPGDSSSTSGMSVGWIRQPPGKALEWLADIWWDDKKDYNPSLKSRLTISKDTSKNQVVLKVTNMDPADTATYYCARSMITNWYFDVWGAGTTVTVSSASTKGPSVFPLAPSSKSTSGGTAALGCLVKDYFPEPVTVSWNSGALTSGVHTFPAVLQSSGLYSLSSVVTVPSSSLGTQTYICNVNHKPSNTKVDKRVEPKSCDKTHTCPPCPAPELLGGPSVFLFPPKPKDTLMISRTPEVTCVVVAVSHEDPEVKFNWYVDGVEVHNAKTKPREEQYNSTYRVVSVLTVLHQDWLNGKEYKCKVSNKALAAPIEKTISKAKGQPREPQVYTLPPSREEMTKNQVSLTCLVKGFYPSDIAVEWESNGQPENNYKTTPPVLDSDGSFFLYSKLTVDKSRWQQGNVFSCSVMHEALHNHYTQKSLSLSPGK

SEQ ID NO: 1065 - protein, 10 aa, Artificial Sequence
  source: /note="Description of Artificial Sequence: Synthetic peptide"
KAQLSVGYMH

SEQ ID NO: 1066 - protein, 7 aa, Artificial Sequence
  source: /note="Description of Artificial Sequence: Synthetic peptide"
DTSKLAS

SEQ ID NO: 1067 - protein, 9 aa, Artificial Sequence
  source: /note="Description of Artificial Sequence: Synthetic peptide"
FQGSGYPFT

SEQ ID NO: 1068 - protein, 6 aa, Artificial Sequence
  source: /note="Description of Artificial Sequence: Synthetic peptide"
QLSVGY

SEQ ID NO: 1069 - protein, 3 aa, Artificial Sequence
  source: /note="Description of Artificial Sequence: Synthetic peptide"
DTS

SEQ ID NO: 1070 - protein, 6 aa, Artificial Sequence
  source: /note="Description of Artificial Sequence: Synthetic peptide"
GSGYPF

SEQ ID NO: 1071 - protein, 106 aa, Artificial Sequence; identical to SEQ ID NO: 15
  source: /note="Description of Artificial Sequence: Synthetic polypeptide"

SEQ ID NO: 1072 - protein, 213 aa, Artificial Sequence; identical to SEQ ID NO: 16
  source: /note="Description of Artificial Sequence: Synthetic polypeptide"

SEQ ID NO: 1073 - protein, 7 aa, Artificial Sequence
  source: /note="Description of Artificial Sequence: Synthetic peptide"
TSGMSVG

SEQ ID NO: 1074 - protein, 203 aa, Artificial Sequence
  source: /note="Description of Artificial Sequence: Synthetic polypeptide"
DIWWDEGICRNRVTNNVKDVTKLVANLPKDYMITLKYVPGMDVLPSHCWISEMVVQLSDSLTDLLDKFSNISEGLSNYSIIDKLVNIVDDLVECVKENSSKDLKKSFKSPEPRLFTPEEFFRIFNRSIDAFKDFVVASETSDCVVSSTLSPEKDSRVSVTKPFMLPPVAASSLRNDSSSSNRKAKNPPGDSSDKKDYNPSLKS

SEQ ID NO: 1075 - protein, 10 aa, Artificial Sequence
  source: /note="Description of Artificial Sequence: Synthetic peptide"
SMITNWYFDV

SEQ ID NO: 1076 - protein, 9 aa, Artificial Sequence
  source: /note="Description of Artificial Sequence: Synthetic peptide"
GFSLSTSGM

SEQ ID NO: 1077 - protein, 192 aa, Artificial Sequence
  source: /note="Description of Artificial Sequence: Synthetic polypeptide"
WWDEGICRNRVTNNVKDVTKLVANLPKDYMITLKYVPGMDVLPSHCWISEMVVQLSDSLTDLLDKFSNISEGLSNYSIIDKLVNIVDDLVECVKENSSKDLKKSFKSPEPRLFTPEEFFRIFNRSIDAFKDFVVASETSDCVVSSTLSPEKDSRVSVTKPFMLPPVAASSLRNDSSSSNRKAKNPPGDSSDK

SEQ ID NO: 1078 - protein, 10 aa, Artificial Sequence
  source: /note="Description of Artificial Sequence: Synthetic peptide"
SMITNWYFDV

SEQ ID NO: 1079 - protein, 307 aa, Artificial Sequence
  source: /note="Description of Artificial Sequence: Synthetic polypeptide"
QVTLRESGPALVKPTQTLTLTCTFSGFSLSTSGMSVGWIRQPPGKALEWLADIWWDEGICRNRVTNNVKDVTKLVANLPKDYMITLKYVPGMDVLPSHCWISEMVVQLSDSLTDLLDKFSNISEGLSNYSIIDKLVNIVDDLVECVKENSSKDLKKSFKSPEPRLFTPEEFFRIFNRSIDAFKDFVVASETSDCVVSSTLSPEKDSRVSVTKPFMLPPVAASSLRNDSSSSNRKAKNPPGDSSDKKDYNPSLKSRLTISKDTSKNQVVLKVTNMDPADTATYYCARSMITNWYFDVWGAGTTVTVSS

SEQ ID NO: 1080 - protein, 637 aa, Artificial Sequence
  source: /note="Description of Artificial Sequence: Synthetic polypeptide"
QVTLRESGPALVKPTQTLTLTCTFSGFSLSTSGMSVGWIRQPPGKALEWLADIWWDEGICRNRVTNNVKDVTKLVANLPKDYMITLKYVPGMDVLPSHCWISEMVVQLSDSLTDLLDKFSNISEGLSNYSIIDKLVNIVDDLVECVKENSSKDLKKSFKSPEPRLFTPEEFFRIFNRSIDAFKDFVVASETSDCVVSSTLSPEKDSRVSVTKPFMLPPVAASSLRNDSSSSNRKAKNPPGDSSDKKDYNPSLKSRLTISKDTSKNQVVLKVTNMDPADTATYYCARSMITNWYFDVWGAGTTVTVSSASTKGPSVFPLAPSSKSTSGGTAALGCLVKDYFPEPVTVSWNSGALTSGVHTFPAVLQSSGLYSLSSVVTVPSSSLGTQTYICNVNHKPSNTKVDKRVEPKSCDKTHTCPPCPAPELLGGPSVFLFPPKPKDTLMISRTPEVTCVVVAVSHEDPEVKFNWYVDGVEVHNAKTKPREEQYNSTYRVVSVLTVLHQDWLNGKEYKCKVSNKALAAPIEKTISKAKGQPREPQVYTLPPSREEMTKNQVSLTCLVKGFYPSDIAVEWESNGQPENNYKTTPPVLDSDGSFFLYSKLTVDKSRWQQGNVFSCSVMHEALHNHYTQKSLSLSPGK

SEQ ID NO: 1081 - protein, 10 aa, Artificial Sequence
  source: /note="Description of Artificial Sequence: Synthetic peptide"
KAQLSVGYMH

SEQ ID NO: 1082 - protein, 7 aa, Artificial Sequence
  source: /note="Description of Artificial Sequence: Synthetic peptide"
DTSKLAS

SEQ ID NO: 1083 - protein, 9 aa, Artificial Sequence
  source: /note="Description of Artificial Sequence: Synthetic peptide"
FQGSGYPFT

SEQ ID NO: 1084 - protein, 6 aa, Artificial Sequence
  source: /note="Description of Artificial Sequence: Synthetic peptide"
QLSVGY

SEQ ID NO: 1085 - protein, 3 aa, Artificial Sequence
  source: /note="Description of Artificial Sequence: Synthetic peptide"
DTS

SEQ ID NO: 1086 - protein, 6 aa, Artificial Sequence
  source: /note="Description of Artificial Sequence: Synthetic peptide"
GSGYPF

SEQ ID NO: 1087 - protein, 106 aa, Artificial Sequence; identical to SEQ ID NO: 15
  source: /note="Description of Artificial Sequence: Synthetic polypeptide"

SEQ ID NO: 1088 - protein, 213 aa, Artificial Sequence; identical to SEQ ID NO: 16
  source: /note="Description of Artificial Sequence: Synthetic polypeptide"

SEQ ID NO: 1089 - protein, 7 aa, Artificial Sequence
  source: /note="Description of Artificial Sequence: Synthetic peptide"
TSGMSVG

SEQ ID NO: 1090 - protein, 16 aa, Artificial Sequence
  source: /note="Description of Artificial Sequence: Synthetic peptide"
DIWWDDKKDYNPSLKS

SEQ ID NO: 1091 - protein, 197 aa, Artificial Sequence
  source: /note="Description of Artificial Sequence: Synthetic polypeptide"
SMITEGICRNRVTNNVKDVTKLVANLPKDYMITLKYVPGMDVLPSHCWISEMVVQLSDSLTDLLDKFSNISEGLSNYSIIDKLVNIVDDLVECVKENSSKDLKKSFKSPEPRLFTPEEFFRIFNRSIDAFKDFVVASETSDCVVSSTLSPEKDSRVSVTKPFMLPPVAASSLRNDSSSSNRKAKNPPGDSSNWYFDV

SEQ ID NO: 1092 - protein, 9 aa, Artificial Sequence
  source: /note="Description of Artificial Sequence: Synthetic peptide"
GFSLSTSGM

SEQ ID NO: 1093 - protein, 5 aa, Artificial Sequence
  source: /note="Description of Artificial Sequence: Synthetic peptide"
WWDDK

SEQ ID NO: 1094 - protein, 197 aa, Artificial Sequence; identical to SEQ ID NO: 1091
  source: /note="Description of Artificial Sequence: Synthetic polypeptide"

SEQ ID NO: 1095 - protein, 307 aa, Artificial Sequence
  source: /note="Description of Artificial Sequence: Synthetic polypeptide"
QVTLRESGPALVKPTQTLTLTCTFSGFSLSTSGMSVGWIRQPPGKALEWLADIWWDDKKDYNPSLKSRLTISKDTSKNQVVLKVTNMDPADTATYYCARSMITEGICRNRVTNNVKDVTKLVANLPKDYMITLKYVPGMDVLPSHCWISEMVVQLSDSLTDLLDKFSNISEGLSNYSIIDKLVNIVDDLVECVKENSSKDLKKSFKSPEPRLFTPEEFFRIFNRSIDAFKDFVVASETSDCVVSSTLSPEKDSRVSVTKPFMLPPVAASSLRNDSSSSNRKAKNPPGDSSNWYFDVWGAGTTVTVSS

SEQ ID NO: 1096 - protein, 637 aa, Artificial Sequence
  source: /note="Description of Artificial Sequence: Synthetic polypeptide"
QVTLRESGPALVKPTQTLTLTCTFSGFSLSTSGMSVGWIRQPPGKALEWLADIWWDDKKDYNPSLKSRLTISKDTSKNQVVLKVTNMDPADTATYYCARSMITEGICRNRVTNNVKDVTKLVANLPKDYMITLKYVPGMDVLPSHCWISEMVVQLSDSLTDLLDKFSNISEGLSNYSIIDKLVNIVDDLVECVKENSSKDLKKSFKSPEPRLFTPEEFFRIFNRSIDAFKDFVVASETSDCVVSSTLSPEKDSRVSVTKPFMLPPVAASSLRNDSSSSNRKAKNPPGDSSNWYFDVWGAGTTVTVSSASTKGPSVFPLAPSSKSTSGGTAALGCLVKDYFPEPVTVSWNSGALTSGVHTFPAVLQSSGLYSLSSVVTVPSSSLGTQTYICNVNHKPSNTKVDKRVEPKSCDKTHTCPPCPAPELLGGPSVFLFPPKPKDTLMISRTPEVTCVVVAVSHEDPEVKFNWYVDGVEVHNAKTKPREEQYNSTYRVVSVLTVLHQDWLNGKEYKCKVSNKALAAPIEKTISKAKGQPREPQVYTLPPSREEMTKNQVSLTCLVKGFYPSDIAVEWESNGQPENNYKTTPPVLDSDGSFFLYSKLTVDKSRWQQGNVFSCSVMHEALHNHYTQKSLSLSPGK

SEQ ID NO: 1097 - protein, 10 aa, Artificial Sequence
  source: /note="Description of Artificial Sequence: Synthetic peptide"
KAQLSVGYMH

SEQ ID NO: 1098 - protein, 7 aa, Artificial Sequence
  source: /note="Description of Artificial Sequence: Synthetic peptide"
DTSKLAS

SEQ ID NO: 1099 - protein, 9 aa, Artificial Sequence
  source: /note="Description of Artificial Sequence: Synthetic peptide"
FQGSGYPFT

SEQ ID NO: 1100 - protein, 6 aa, Artificial Sequence
  source: /note="Description of Artificial Sequence: Synthetic peptide"
QLSVGY

SEQ ID NO: 1101 - protein, 3 aa, Artificial Sequence
  source: /note="Description of Artificial Sequence: Synthetic peptide"
DTS

SEQ ID NO: 1102 - protein, 6 aa, Artificial Sequence
  source: /note="Description of Artificial Sequence: Synthetic peptide"
GSGYPF

SEQ ID NO: 1103 - protein, 106 aa, Artificial Sequence; identical to SEQ ID NO: 15
  source: /note="Description of Artificial Sequence: Synthetic polypeptide"

SEQ ID NO: 1104 - protein, 213 aa, Artificial Sequence; identical to SEQ ID NO: 16
  source: /note="Description of Artificial Sequence: Synthetic polypeptide"

SEQ ID NO: 1105 - protein, 7 aa, Artificial Sequence
  source: /note="Description of Artificial Sequence: Synthetic peptide"
TSGMSVG

SEQ ID NO: 1106 - protein, 15 aa, Artificial Sequence
  source: /note="Description of Artificial Sequence: Synthetic peptide"
DIWWDDKKDYNPSLK

SEQ ID NO: 1107 - protein, 10 aa, Artificial Sequence
  source: /note="Description of Artificial Sequence: Synthetic peptide"
SMITNWYFDV

SEQ ID NO: 1108 - protein, 9 aa, Artificial Sequence
  source: /note="Description of Artificial Sequence: Synthetic peptide"
GFSLSTSGM

SEQ ID NO: 1109 - protein, 5 aa, Artificial Sequence
  source: /note="Description of Artificial Sequence: Synthetic peptide"
WWDDK

SEQ ID NO: 1110 - protein, 10 aa, Artificial Sequence
  source: /note="Description of Artificial Sequence: Synthetic peptide"
SMITNWYFDV

SEQ ID NO: 1111 - protein, 120 aa, Artificial Sequence; identical to SEQ ID NO: 55
  source: /note="Description of Artificial Sequence: Synthetic polypeptide"

SEQ ID NO: 1112 - protein, 450 aa, Artificial Sequence; identical to SEQ ID NO: 56
  source: /note="Description of Artificial Sequence: Synthetic polypeptide"

SEQ ID NO: 1113 - protein, 197 aa, Artificial Sequence
  source: /note="Description of Artificial Sequence: Synthetic polypeptide"
KAQLSEGICRNRVTNNVKDVTKLVANLPKDYMITLKYVPGMDVLPSHCWISEMVVQLSDSLTDLLDKFSNISEGLSNYSIIDKLVNIVDDLVECVKENSSKDLKKSFKSPEPRLFTPEEFFRIFNRSIDAFKDFVVASETSDCVVSSTLSPEKDSRVSVTKPFMLPPVAASSLRNDSSSSNRKAKNPPGDSSVGYMH

SEQ ID NO: 1114 - protein, 7 aa, Artificial Sequence
  source: /note="Description of Artificial Sequence: Synthetic peptide"
DTSKLAS

SEQ ID NO: 1115 - protein, 9 aa, Artificial Sequence
  source: /note="Description of Artificial Sequence: Synthetic peptide"
FQGSGYPFT

SEQ ID NO: 1116 - protein, 193 aa, Artificial Sequence
  source: /note="Description of Artificial Sequence: Synthetic polypeptide"
QLSEGICRNRVTNNVKDVTKLVANLPKDYMITLKYVPGMDVLPSHCWISEMVVQLSDSLTDLLDKFSNISEGLSNYSIIDKLVNIVDDLVECVKENSSKDLKKSFKSPEPRLFTPEEFFRIFNRSIDAFKDFVVASETSDCVVSSTLSPEKDSRVSVTKPFMLPPVAASSLRNDSSSSNRKAKNPPGDSSVGY

SEQ ID NO: 1117 - protein, 3 aa, Artificial Sequence
  source: /note="Description of Artificial Sequence: Synthetic peptide"
DTS

SEQ ID NO: 1118 - protein, 6 aa, Artificial Sequence
  source: /note="Description of Artificial Sequence: Synthetic peptide"
GSGYPF

SEQ ID NO: 1119 - protein, 293 aa, Artificial Sequence
  source: /note="Description of Artificial Sequence: Synthetic polypeptide"
DIQMTQSPSTLSASVGDRVTITCKAQLSEGICRNRVTNNVKDVTKLVANLPKDYMITLKYVPGMDVLPSHCWISEMVVQLSDSLTDLLDKFSNISEGLSNYSIIDKLVNIVDDLVECVKENSSKDLKKSFKSPEPRLFTPEEFFRIFNRSIDAFKDFVVASETSDCVVSSTLSPEKDSRVSVTKPFMLPPVAASSLRNDSSSSNRKAKNPPGDSSVGYMHWYQQKPGKAPKLLIYDTSKLASGVPSRFSGSGSGTEFTLTISSLQPDDFATYYCFQGSGYPFTFGGGTKLEIK

SEQ ID NO: 1120 - protein, 400 aa, Artificial Sequence
  source: /note="Description of Artificial Sequence: Synthetic polypeptide"
DIQMTQSPSTLSASVGDRVTITCKAQLSEGICRNRVTNNVKDVTKLVANLPKDYMITLKYVPGMDVLPSHCWISEMVVQLSDSLTDLLDKFSNISEGLSNYSIIDKLVNIVDDLVECVKENSSKDLKKSFKSPEPRLFTPEEFFRIFNRSIDAFKDFVVASETSDCVVSSTLSPEKDSRVSVTKPFMLPPVAASSLRNDSSSSNRKAKNPPGDSSVGYMHWYQQKPGKAPKLLIYDTSKLASGVPSRFSGSGSGTEFTLTISSLQPDDFATYYCFQGSGYPFTFGGGTKLEIKRTVAAPSVFIFPPSDEQLKSGTASVVCLLNNFYPREAKVQWKVDNALQSGNSQESVTEQDSKDSTYSLSSTLTLSKADYEKHKVYACEVTHQGLSSPVTKSFNRGEC

SEQ ID NO: 1121 - protein, 7 aa, Artificial Sequence
  source: /note="Description of Artificial Sequence: Synthetic peptide"
TSGMSVG

SEQ ID NO: 1122 - protein, 15 aa, Artificial Sequence
  source: /note="Description of Artificial Sequence: Synthetic peptide"
DIWWDDKKDYNPSLK

SEQ ID NO: 1123 - protein, 10 aa, Artificial Sequence
  source: /note="Description of Artificial Sequence: Synthetic peptide"
SMITNWYFDV

SEQ ID NO: 1124 - protein, 9 aa, Artificial Sequence
  source: /note="Description of Artificial Sequence: Synthetic peptide"
GFSLSTSGM

SEQ ID NO: 1125 - protein, 5 aa, Artificial Sequence
  source: /note="Description of Artificial Sequence: Synthetic peptide"
WWDDK

SEQ ID NO: 1126 - protein, 10 aa, Artificial Sequence
  source: /note="Description of Artificial Sequence: Synthetic peptide"
SMITNWYFDV

SEQ ID NO: 1127 - protein, 120 aa, Artificial Sequence; identical to SEQ ID NO: 55
  source: /note="Description of Artificial Sequence: Synthetic polypeptide"

SEQ ID NO: 1128 - protein, 450 aa, Artificial Sequence; identical to SEQ ID NO: 56
  source: /note="Description of Artificial Sequence: Synthetic polypeptide"

SEQ ID NO: 1129 - protein, 10 aa, Artificial Sequence
  source: /note="Description of Artificial Sequence: Synthetic peptide"
KAQLSVGYMH

SEQ ID NO: 1130 - protein, 194 aa, Artificial Sequence
  source: /note="Description of Artificial Sequence: Synthetic polypeptide"
DTEGICRNRVTNNVKDVTKLVANLPKDYMITLKYVPGMDVLPSHCWISEMVVQLSDSLTDLLDKFSNISEGLSNYSIIDKLVNIVDDLVECVKENSSKDLKKSFKSPEPRLFTPEEFFRIFNRSIDAFKDFVVASETSDCVVSSTLSPEKDSRVSVTKPFMLPPVAASSLRNDSSSSNRKAKNPPGDSSSKLAS

SEQ ID NO: 1131 - protein, 9 aa, Artificial Sequence
  source: /note="Description of Artificial Sequence: Synthetic peptide"
FQGSGYPFT

SEQ ID NO: 1132 - protein, 6 aa, Artificial Sequence
  source: /note="Description of Artificial Sequence: Synthetic peptide"
QLSVGY

SEQ ID NO: 1133 - protein, 190 aa, Artificial Sequence
  source: /note="Description of Artificial Sequence: Synthetic polypeptide"
DTEGICRNRVTNNVKDVTKLVANLPKDYMITLKYVPGMDVLPSHCWISEMVVQLSDSLTDLLDKFSNISEGLSNYSIIDKLVNIVDDLVECVKENSSKDLKKSFKSPEPRLFTPEEFFRIFNRSIDAFKDFVVASETSDCVVSSTLSPEKDSRVSVTKPFMLPPVAASSLRNDSSSSNRKAKNPPGDSSS

SEQ ID NO: 1134 - protein, 6 aa, Artificial Sequence
  source: /note="Description of Artificial Sequence: Synthetic peptide"
GSGYPF

SEQ ID NO: 1135 - protein, 293 aa, Artificial Sequence
  source: /note="Description of Artificial Sequence: Synthetic polypeptide"
DIQMTQSPSTLSASVGDRVTITCKAQLSVGYMHWYQQKPGKAPKLLIYDTEGICRNRVTNNVKDVTKLVANLPKDYMITLKYVPGMDVLPSHCWISEMVVQLSDSLTDLLDKFSNISEGLSNYSIIDKLVNIVDDLVECVKENSSKDLKKSFKSPEPRLFTPEEFFRIFNRSIDAFKDFVVASETSDCVVSSTLSPEKDSRVSVTKPFMLPPVAASSLRNDSSSSNRKAKNPPGDSSSKLASGVPSRFSGSGSGTEFTLTISSLQPDDFATYYCFQGSGYPFTFGGGTKLEIK

SEQ ID NO: 1136 - protein, 400 aa, Artificial Sequence
  source: /note="Description of Artificial Sequence: Synthetic polypeptide"
DIQMTQSPSTLSASVGDRVTITCKAQLSVGYMHWYQQKPGKAPKLLIYDTEGICRNRVTNNVKDVTKLVANLPKDYMITLKYVPGMDVLPSHCWISEMVVQLSDSLTDLLDKFSNISEGLSNYSIIDKLVNIVDDLVECVKENSSKDLKKSFKSPEPRLFTPEEFFRIFNRSIDAFKDFVVASETSDCVVSSTLSPEKDSRVSVTKPFMLPPVAASSLRNDSSSSNRKAKNPPGDSSSKLASGVPSRFSGSGSGTEFTLTISSLQPDDFATYYCFQGSGYPFTFGGGTKLEIKRTVAAPSVFIFPPSDEQLKSGTASVVCLLNNFYPREAKVQWKVDNALQSGNSQESVTEQDSKDSTYSLSSTLTLSKADYEKHKVYACEVTHQGLSSPVTKSFNRGEC

SEQ ID NO: 1137 - protein, 7 aa, Artificial Sequence
  source: /note="Description of Artificial Sequence: Synthetic peptide"
TSGMSVG

SEQ ID NO: 1138 - protein, 15 aa, Artificial Sequence
  source: /note="Description of Artificial Sequence: Synthetic peptide"
DIWWDDKKDYNPSLK

SEQ ID NO: 1139 - protein, 10 aa, Artificial Sequence
  source: /note="Description of Artificial Sequence: Synthetic peptide"
SMITNWYFDV

SEQ ID NO: 1140 - protein, 9 aa, Artificial Sequence
  source: /note="Description of Artificial Sequence: Synthetic peptide"
GFSLSTSGM

SEQ ID NO: 1141 - protein, 5 aa, Artificial Sequence
  source: /note="Description of Artificial Sequence: Synthetic peptide"
WWDDK

SEQ ID NO: 1142 - protein, 10 aa, Artificial Sequence
  source: /note="Description of Artificial Sequence: Synthetic peptide"
SMITNWYFDV

SEQ ID NO: 1143 - protein, 120 aa, Artificial Sequence; identical to SEQ ID NO: 55
  source: /note="Description of Artificial Sequence: Synthetic polypeptide"

SEQ ID NO: 1144 - protein, 450 aa, Artificial Sequence; identical to SEQ ID NO: 56
  source: /note="Description of Artificial Sequence: Synthetic polypeptide"

SEQ ID NO: 1145 - protein, 10 aa, Artificial Sequence
  source: /note="Description of Artificial Sequence: Synthetic peptide"
KAQLSVGYMH

SEQ ID NO: 1146 - protein, 7 aa, Artificial Sequence
  source: /note="Description of Artificial Sequence: Synthetic peptide"
DTSKLAS

SEQ ID NO: 1147 - protein, 196 aa, Artificial Sequence
  source: /note="Description of Artificial Sequence: Synthetic polypeptide"
FQGSGEGICRNRVTNNVKDVTKLVANLPKDYMITLKYVPGMDVLPSHCWISEMVVQLSDSLTDLLDKFSNISEGLSNYSIIDKLVNIVDDLVECVKENSSKDLKKSFKSPEPRLFTPEEFFRIFNRSIDAFKDFVVASETSDCVVSSTLSPEKDSRVSVTKPFMLPPVAASSLRNDSSSSNRKAKNPPGDSSYPFT

SEQ ID NO: 1148 - protein, 6 aa, Artificial Sequence
  source: /note="Description of Artificial Sequence: Synthetic peptide"
QLSVGY

SEQ ID NO: 1149 - protein, 3 aa, Artificial Sequence
  source: /note="Description of Artificial Sequence: Synthetic peptide"
DTS

SEQ ID NO: 1150 - protein, 193 aa, Artificial Sequence
  source: /note="Description of Artificial Sequence: Synthetic polypeptide"
GSGEGICRNRVTNNVKDVTKLVANLPKDYMITLKYVPGMDVLPSHCWISEMVVQLSDSLTDLLDKFSNISEGLSNYSIIDKLVNIVDDLVECVKENSSKDLKKSFKSPEPRLFTPEEFFRIFNRSIDAFKDFVVASETSDCVVSSTLSPEKDSRVSVTKPFMLPPVAASSLRNDSSSSNRKAKNPPGDSSYPF

SEQ ID NO: 1151 - protein, 293 aa, Artificial Sequence
  source: /note="Description of Artificial Sequence: Synthetic polypeptide"
DIQMTQSPSTLSASVGDRVTITCKAQLSVGYMHWYQQKPGKAPKLLIYDTSKLASGVPSRFSGSGSGTEFTLTISSLQPDDFATYYCFQGSGEGICRNRVTNNVKDVTKLVANLPKDYMITLKYVPGMDVLPSHCWISEMVVQLSDSLTDLLDKFSNISEGLSNYSIIDKLVNIVDDLVECVKENSSKDLKKSFKSPEPRLFTPEEFFRIFNRSIDAFKDFVVASETSDCVVSSTLSPEKDSRVSVTKPFMLPPVAASSLRNDSSSSNRKAKNPPGDSSYPFTFGGGTKLEIK

SEQ ID NO: 1152 - protein, 400 aa, Artificial Sequence
  source: /note="Description of Artificial Sequence: Synthetic polypeptide"
DIQMTQSPSTLSASVGDRVTITCKAQLSVGYMHWYQQKPGKAPKLLIYDTSKLASGVPSRFSGSGSGTEFTLTISSLQPDDFATYYCFQGSGEGICRNRVTNNVKDVTKLVANLPKDYMITLKYVPGMDVLPSHCWISEMVVQLSDSLTDLLDKFSNISEGLSNYSIIDKLVNIVDDLVECVKENSSKDLKKSFKSPEPRLFTPEEFFRIFNRSIDAFKDFVVASETSDCVVSSTLSPEKDSRVSVTKPFMLPPVAASSLRNDSSSSNRKAKNPPGDSSYPFTFGGGTKLEIKRTVAAPSVFIFPPSDEQLKSGTASVVCLLNNFYPREAKVQWKVDNALQSGNSQESVTEQDSKDSTYSLSSTLTLSKADYEKHKVYACEVTHQGLSSPVTKSFNRGEC

SEQ ID NO: 1153 - protein, 181 aa, Artificial Sequence
  source: /note="Description of Artificial Sequence: Synthetic polypeptide"
PLGPASSLPQSFLLKCLEQVRKIQGDGAALQEKLCATYKLCHPEELVLLGHSLGIPWAPLSSCPSQALQLAGCLSQLHSGLFLYQGLLQALEGISPELGPTLDTLQLDVADFATTIWQQMEELGMAPALQPTQGAMPAFASAFQRRAGGVLVASHLQSFLEVSYRVLRHLAQPSTSGMSVG

SEQ ID NO: 1154 - protein, 16 aa, Artificial Sequence
  source: /note="Description of Artificial Sequence: Synthetic peptide"
DIWWDDKKDYNPSLKS

SEQ ID NO: 1155 - protein, 10 aa, Artificial Sequence
  source: /note="Description of Artificial Sequence: Synthetic peptide"
SMITNWYFDV

SEQ ID NO: 1156 - protein, 183 aa, Artificial Sequence
  source: /note="Description of Artificial Sequence: Synthetic polypeptide"
GFSLTPLGPASSLPQSFLLKCLEQVRKIQGDGAALQEKLCATYKLCHPEELVLLGHSLGIPWAPLSSCPSQALQLAGCLSQLHSGLFLYQGLLQALEGISPELGPTLDTLQLDVADFATTIWQQMEELGMAPALQPTQGAMPAFASAFQRRAGGVLVASHLQSFLEVSYRVLRHLAQPSTSGM

SEQ ID NO: 1157 - protein, 5 aa, Artificial Sequence
  source: /note="Description of Artificial Sequence: Synthetic peptide"
WWDDK

SEQ ID NO: 1158 - protein, 10 aa, Artificial Sequence
  source: /note="Description of Artificial Sequence: Synthetic peptide"
SMITNWYFDV

SEQ ID NO: 1159 - protein, 294 aa, Artificial Sequence
  source: /note="Description of Artificial Sequence: Synthetic polypeptide"
QVTLRESGPALVKPTQTLTLTCTFSGFSLTPLGPASSLPQSFLLKCLEQVRKIQGDGAALQEKLCATYKLCHPEELVLLGHSLGIPWAPLSSCPSQALQLAGCLSQLHSGLFLYQGLLQALEGISPELGPTLDTLQLDVADFATTIWQQMEELGMAPALQPTQGAMPAFASAFQRRAGGVLVASHLQSFLEVSYRVLRHLAQPSTSGMSVGWIRQPPGKALEWLADIWWDDKKDYNPSLKSRLTISKDTSKNQVVLKVTNMDPADTATYYCARSMITNWYFDVWGAGTTVTVSS

SEQ ID NO: 1160 - protein, 624 aa, Artificial Sequence
  source: /note="Description of Artificial Sequence: Synthetic polypeptide"
QVTLRESGPALVKPTQTLTLTCTFSGFSLTPLGPASSLPQSFLLKCLEQVRKIQGDGAALQEKLCATYKLCHPEELVLLGHSLGIPWAPLSSCPSQALQLAGCLSQLHSGLFLYQGLLQALEGISPELGPTLDTLQLDVADFATTIWQQMEELGMAPALQPTQGAMPAFASAFQRRAGGVLVASHLQSFLEVSYRVLRHLAQPSTSGMSVGWIRQPPGKALEWLADIWWDDKKDYNPSLKSRLTISKDTSKNQVVLKVTNMDPADTATYYCARSMITNWYFDVWGAGTTVTVSSASTKGPSVFPLAPSSKSTSGGTAALGCLVKDYFPEPVTVSWNSGALTSGVHTFPAVLQSSGLYSLSSVVTVPSSSLGTQTYICNVNHKPSNTKVDKRVEPKSCDKTHTCPPCPAPELLGGPSVFLFPPKPKDTLMISRTPEVTCVVVAVSHEDPEVKFNWYVDGVEVHNAKTKPREEQYNSTYRVVSVLTVLHQDWLNGKEYKCKVSNKALAAPIEKTISKAKGQPREPQVYTLPPSREEMTKNQVSLTCLVKGFYPSDIAVEWESNGQPENNYKTTPPVLDSDGSFFLYSKLTVDKSRWQQGNVFSCSVMHEALHNHYTQKSLSLSPGK

SEQ ID NO: 1161 - protein, 10 aa, Artificial Sequence
  source: /note="Description of Artificial Sequence: Synthetic peptide"
KAQLSVGYMH

SEQ ID NO: 1162 - protein, 7 aa, Artificial Sequence
  source: /note="Description of Artificial Sequence: Synthetic peptide"
DTSKLAS

SEQ ID NO: 1163 - protein, 9 aa, Artificial Sequence
  source: /note="Description of Artificial Sequence: Synthetic peptide"
FQGSGYPFT

SEQ ID NO: 1164 - protein, 6 aa, Artificial Sequence
  source: /note="Description of Artificial Sequence: Synthetic peptide"
QLSVGY

SEQ ID NO: 1165 - protein, 3 aa, Artificial Sequence
  source: /note="Description of Artificial Sequence: Synthetic peptide"
DTS

SEQ ID NO: 1166 - protein, 6 aa, Artificial Sequence
  source: /note="Description of Artificial Sequence: Synthetic peptide"
GSGYPF

SEQ ID NO: 1167 - protein, 106 aa, Artificial Sequence; identical to SEQ ID NO: 15
  source: /note="Description of Artificial Sequence: Synthetic polypeptide"

SEQ ID NO: 1168 - protein, 213 aa, Artificial Sequence; identical to SEQ ID NO: 16
  source: /note="Description of Artificial Sequence: Synthetic polypeptide"

SEQ ID NO: 1169 - protein, 7 aa, Artificial Sequence
  source: /note="Description of Artificial Sequence: Synthetic peptide"
TSGMSVG

SEQ ID NO: 1170 - protein, 190 aa, Artificial Sequence
  source: /note="Description of Artificial Sequence: Synthetic polypeptide"
DIWWDTPLGPASSLPQSFLLKCLEQVRKIQGDGAALQEKLCATYKLCHPEELVLLGHSLGIPWAPLSSCPSQALQLAGCLSQLHSGLFLYQGLLQALEGISPELGPTLDTLQLDVADFATTIWQQMEELGMAPALQPTQGAMPAFASAFQRRAGGVLVASHLQSFLEVSYRVLRHLAQPDKKDYNPSLKS

SEQ ID NO: 1171 - protein, 10 aa, Artificial Sequence
  source: /note="Description of Artificial Sequence: Synthetic peptide"
SMITNWYFDV

SEQ ID NO: 1172 - protein, 9 aa, Artificial Sequence
  source: /note="Description of Artificial Sequence: Synthetic peptide"
GFSLSTSGM

SEQ ID NO: 1173 - protein, 179 aa, Artificial Sequence
  source: /note="Description of Artificial Sequence: Synthetic polypeptide"
WWDTPLGPASSLPQSFLLKCLEQVRKIQGDGAALQEKLCATYKLCHPEELVLLGHSLGIPWAPLSSCPSQALQLAGCLSQLHSGLFLYQGLLQALEGISPELGPTLDTLQLDVADFATTIWQQMEELGMAPALQPTQGAMPAFASAFQRRAGGVLVASHLQSFLEVSYRVLRHLAQPDK

SEQ ID NO: 1174 - protein, 10 aa, Artificial Sequence
  source: /note="Description of Artificial Sequence: Synthetic peptide"
SMITNWYFDV

SEQ ID NO: 1175 - protein, 294 aa, Artificial Sequence
  source: /note="Description of Artificial Sequence: Synthetic polypeptide"
QVTLRESGPALVKPTQTLTLTCTFSGFSLSTSGMSVGWIRQPPGKALEWLADIWWDTPLGPASSLPQSFLLKCLEQVRKIQGDGAALQEKLCATYKLCHPEELVLLGHSLGIPWAPLSSCPSQALQLAGCLSQLHSGLFLYQGLLQALEGISPELGPTLDTLQLDVADFATTIWQQMEELGMAPALQPTQGAMPAFASAFQRRAGGVLVASHLQSFLEVSYRVLRHLAQPDKKDYNPSLKSRLTISKDTSKNQVVLKVTNMDPADTATYYCARSMITNWYFDVWGAGTTVTVSS

SEQ ID NO: 1176 - protein, 624 aa, Artificial Sequence
  source: /note="Description of Artificial Sequence: Synthetic polypeptide"
QVTLRESGPALVKPTQTLTLTCTFSGFSLSTSGMSVGWIRQPPGKALEWLADIWWDTPLGPASSLPQSFLLKCLEQVRKIQGDGAALQEKLCATYKLCHPEELVLLGHSLGIPWAPLSSCPSQALQLAGCLSQLHSGLFLYQGLLQALEGISPELGPTLDTLQLDVADFATTIWQQMEELGMAPALQPTQGAMPAFASAFQRRAGGVLVASHLQSFLEVSYRVLRHLAQPDKKDYNPSLKSRLTISKDTSKNQVVLKVTNMDPADTATYYCARSMITNWYFDVWGAGTTVTVSSASTKGPSVFPLAPSSKSTSGGTAALGCLVKDYFPEPVTVSWNSGALTSGVHTFPAVLQSSGLYSLSSVVTVPSSSLGTQTYICNVNHKPSNTKVDKRVEPKSCDKTHTCPPCPAPELLGGPSVFLFPPKPKDTLMISRTPEVTCVVVAVSHEDPEVKFNWYVDGVEVHNAKTKPREEQYNSTYRVVSVLTVLHQDWLNGKEYKCKVSNKALAAPIEKTISKAKGQPREPQVYTLPPSREEMTKNQVSLTCLVKGFYPSDIAVEWESNGQPENNYKTTPPVLDSDGSFFLYSKLTVDKSRWQQGNVFSCSVMHEALHNHYTQKSLSLSPGK

SEQ ID NO: 1177 - protein, 10 aa, Artificial Sequence
  source: /note="Description of Artificial Sequence: Synthetic peptide"
KAQLSVGYMH

SEQ ID NO: 1178 - protein, 7 aa, Artificial Sequence
  source: /note="Description of Artificial Sequence: Synthetic peptide"
DTSKLAS

SEQ ID NO: 1179 - protein, 9 aa, Artificial Sequence
  source: /note="Description of Artificial Sequence: Synthetic peptide"
FQGSGYPFT

SEQ ID NO: 1180 - protein, 6 aa, Artificial Sequence
  source: /note="Description of Artificial Sequence: Synthetic peptide"
QLSVGY

SEQ ID NO: 1181 - protein, 3 aa, Artificial Sequence
  source: /note="Description of Artificial Sequence: Synthetic peptide"
DTS

SEQ ID NO: 1182 - protein, 6 aa, Artificial Sequence
  source: /note="Description of Artificial Sequence: Synthetic peptide"
GSGYPF

SEQ ID NO: 1183 - protein, 106 aa, Artificial Sequence; identical to SEQ ID NO: 15
  source: /note="Description of Artificial Sequence: Synthetic polypeptide"

SEQ ID NO: 1184 - protein, 213 aa, Artificial Sequence; identical to SEQ ID NO: 16
  source: /note="Description of Artificial Sequence: Synthetic polypeptide"

SEQ ID NO: 1185 - protein, 7 aa, Artificial Sequence
  source: /note="Description of Artificial Sequence: Synthetic peptide"
TSGMSVG

SEQ ID NO: 1186 - protein, 16 aa, Artificial Sequence
  source: /note="Description of Artificial Sequence: Synthetic peptide"
DIWWDDKKDYNPSLKS

SEQ ID NO: 1187 - protein, 184 aa, Artificial Sequence
  source: /note="Description of Artificial Sequence: Synthetic polypeptide"
SMITTPLGPASSLPQSFLLKCLEQVRKIQGDGAALQEKLCATYKLCHPEELVLLGHSLGIPWAPLSSCPSQALQLAGCLSQLHSGLFLYQGLLQALEGISPELGPTLDTLQLDVADFATTIWQQMEELGMAPALQPTQGAMPAFASAFQRRAGGVLVASHLQSFLEVSYRVLRHLAQPNWYFDV

SEQ ID NO: 1188 - protein, 9 aa, Artificial Sequence
  source: /note="Description of Artificial Sequence: Synthetic peptide"
GFSLSTSGM

SEQ ID NO: 1189 - protein, 5 aa, Artificial Sequence
  source: /note="Description of Artificial Sequence: Synthetic peptide"
WWDDK

SEQ ID NO: 1190 - protein, 184 aa, Artificial Sequence; identical to SEQ ID NO: 1187
  source: /note="Description of Artificial Sequence: Synthetic polypeptide"

SEQ ID NO: 1191 - protein, 294 aa, Artificial Sequence
  source: /note="Description of Artificial Sequence: Synthetic polypeptide"
QVTLRESGPALVKPTQTLTLTCTFSGFSLSTSGMSVGWIRQPPGKALEWLADIWWDDKKDYNPSLKSRLTISKDTSKNQVVLKVTNMDPADTATYYCARSMITTPLGPASSLPQSFLLKCLEQVRKIQGDGAALQEKLCATYKLCHPEELVLLGHSLGIPWAPLSSCPSQALQLAGCLSQLHSGLFLYQGLLQALEGISPELGPTLDTLQLDVADFATTIWQQMEELGMAPALQPTQGAMPAFASAFQRRAGGVLVASHLQSFLEVSYRVLRHLAQPNWYFDVWGAGTTVTVSS

SEQ ID NO: 1192 - protein, 624 aa, Artificial Sequence
  source: /note="Description of Artificial Sequence: Synthetic polypeptide"
QVTLRESGPALVKPTQTLTLTCTFSGFSLSTSGMSVGWIRQPPGKALEWLADIWWDDKKDYNPSLKSRLTISKDTSKNQVVLKVTNMDPADTATYYCARSMITTPLGPASSLPQSFLLKCLEQVRKIQGDGAALQEKLCATYKLCHPEELVLLGHSLGIPWAPLSSCPSQALQLAGCLSQLHSGLFLYQGLLQALEGISPELGPTLDTLQLDVADFATTIWQQMEELGMAPALQPTQGAMPAFASAFQRRAGGVLVASHLQSFLEVSYRVLRHLAQPNWYFDVWGAGTTVTVSSASTKGPSVFPLAPSSKSTSGGTAALGCLVKDYFPEPVTVSWNSGALTSGVHTFPAVLQSSGLYSLSSVVTVPSSSLGTQTYICNVNHKPSNTKVDKRVEPKSCDKTHTCPPCPAPELLGGPSVFLFPPKPKDTLMISRTPEVTCVVVAVSHEDPEVKFNWYVDGVEVHNAKTKPREEQYNSTYRVVSVLTVLHQDWLNGKEYKCKVSNKALAAPIEKTISKAKGQPREPQVYTLPPSREEMTKNQVSLTCLVKGFYPSDIAVEWESNGQPENNYKTTPPVLDSDGSFFLYSKLTVDKSRWQQGNVFSCSVMHEALHNHYTQKSLSLSPGK

SEQ ID NO: 1193 - protein, 10 aa, Artificial Sequence
  source: /note="Description of Artificial Sequence: Synthetic peptide"
KAQLSVGYMH

SEQ ID NO: 1194 - protein, 7 aa, Artificial Sequence
  source: /note="Description of Artificial Sequence: Synthetic peptide"
DTSKLAS

SEQ ID NO: 1195 - protein, 9 aa, Artificial Sequence
  source: /note="Description of Artificial Sequence: Synthetic peptide"
FQGSGYPFT

SEQ ID NO: 1196 - protein, 6 aa, Artificial Sequence
  source: /note="Description of Artificial Sequence: Synthetic peptide"
QLSVGY

SEQ ID NO: 1197 - protein, 3 aa, Artificial Sequence
  source: /note="Description of Artificial Sequence: Synthetic peptide"
DTS

SEQ ID NO: 1198 - protein, 6 aa, Artificial Sequence
  source: /note="Description of Artificial Sequence: Synthetic peptide"
GSGYPF

SEQ ID NO: 1199 - protein, 106 aa, Artificial Sequence; identical to SEQ ID NO: 15
  source: /note="Description of Artificial Sequence: Synthetic polypeptide"

SEQ ID NO: 1200 - protein, 213 aa, Artificial Sequence; identical to SEQ ID NO: 16
  source: /note="Description of Artificial Sequence: Synthetic polypeptide"

SEQ ID NO: 1201 - protein, 7 aa, Artificial Sequence
  source: /note="Description of Artificial Sequence: Synthetic peptide"
TSGMSVG

SEQ ID NO: 1202 - protein, 15 aa, Artificial Sequence
  source: /note="Description of Artificial Sequence: Synthetic peptide"
DIWWDDKKDYNPSLK

SEQ ID NO: 1203 - protein, 10 aa, Artificial Sequence
  source: /note="Description of Artificial Sequence: Synthetic peptide"
SMITNWYFDV

SEQ ID NO: 1204 - protein, 9 aa, Artificial Sequence
  source: /note="Description of Artificial Sequence: Synthetic peptide"
GFSLSTSGM

SEQ ID NO: 1205 - protein, 5 aa, Artificial Sequence
  source: /note="Description of Artificial Sequence: Synthetic peptide"
WWDDK

SEQ ID NO: 1206 - protein, 10 aa, Artificial Sequence
  source: /note="Description of Artificial Sequence: Synthetic peptide"
SMITNWYFDV

SEQ ID NO: 1207 - protein, 120 aa, Artificial Sequence; identical to SEQ ID NO: 55
  source: /note="Description of Artificial Sequence: Synthetic polypeptide"

SEQ ID NO: 1208 - protein, 450 aa, Artificial Sequence; identical to SEQ ID NO: 56
  source: /note="Description of Artificial Sequence: Synthetic polypeptide"

SEQ ID NO: 1209 - protein, 184 aa, Artificial Sequence
  source: /note="Description of Artificial Sequence: Synthetic polypeptide"
KAQLSTPLGPASSLPQSFLLKCLEQVRKIQGDGAALQEKLCATYKLCHPEELVLLGHSLGIPWAPLSSCPSQALQLAGCLSQLHSGLFLYQGLLQALEGISPELGPTLDTLQLDVADFATTIWQQMEELGMAPALQPTQGAMPAFASAFQRRAGGVLVASHLQSFLEVSYRVLRHLAQPVGYMH

SEQ ID NO: 1210 - protein, 7 aa, Artificial Sequence
  source: /note="Description of Artificial Sequence: Synthetic peptide"
DTSKLAS

SEQ ID NO: 1211 - protein, 9 aa, Artificial Sequence
  source: /note="Description of Artificial Sequence: Synthetic peptide"
FQGSGYPFT

SEQ ID NO: 1212 - protein, 180 aa, Artificial Sequence
  source: /note="Description of Artificial Sequence: Synthetic polypeptide"
QLSTPLGPASSLPQSFLLKCLEQVRKIQGDGAALQEKLCATYKLCHPEELVLLGHSLGIPWAPLSSCPSQALQLAGCLSQLHSGLFLYQGLLQALEGISPELGPTLDTLQLDVADFATTIWQQMEELGMAPALQPTQGAMPAFASAFQRRAGGVLVASHLQSFLEVSYRVLRHLAQPVGY

SEQ ID NO: 1213 - protein, 3 aa, Artificial Sequence
  source: /note="Description of Artificial Sequence: Synthetic peptide"
DTS

SEQ ID NO: 1214 - protein, 6 aa, Artificial Sequence
  source: /note="Description of Artificial Sequence: Synthetic peptide"
GSGYPF

SEQ ID NO: 1215 - protein, 280 aa, Artificial Sequence
  source: /note="Description of Artificial Sequence: Synthetic polypeptide"
DIQMTQSPSTLSASVGDRVTITCKAQLSTPLGPASSLPQSFLLKCLEQVRKIQGDGAALQEKLCATYKLCHPEELVLLGHSLGIPWAPLSSCPSQALQLAGCLSQLHSGLFLYQGLLQALEGISPELGPTLDTLQLDVADFATTIWQQMEELGMAPALQPTQGAMPAFASAFQRRAGGVLVASHLQSFLEVSYRVLRHLAQPVGYMHWYQQKPGKAPKLLIYDTSKLASGVPSRFSGSGSGTEFTLTISSLQPDDFATYYCFQGSGYPFTFGGGTKLEIK

SEQ ID NO: 1216 - protein, 387 aa, Artificial Sequence
  source: /note="Description of Artificial Sequence: Synthetic polypeptide"
DIQMTQSPSTLSASVGDRVTITCKAQLSTPLGPASSLPQSFLLKCLEQVRKIQGDGAALQEKLCATYKLCHPEELVLLGHSLGIPWAPLSSCPSQALQLAGCLSQLHSGLFLYQGLLQALEGISPELGPTLDTLQLDVADFATTIWQQMEELGMAPALQPTQGAMPAFASAFQRRAGGVLVASHLQSFLEVSYRVLRHLAQPVGYMHWYQQKPGKAPKLLIYDTSKLASGVPSRFSGSGSGTEFTLTISSLQPDDFATYYCFQGSGYPFTFGGGTKLEIKRTVAAPSVFIFPPSDEQLKSGTASVVCLLNNFYPREAKVQWKVDNALQSGNSQESVTEQDSKDSTYSLSSTLTLSKADYEKHKVYACEVTHQGLSSPVTKSFNRGEC

SEQ ID NO: 1217 - protein, 7 aa, Artificial Sequence
  source: /note="Description of Artificial Sequence: Synthetic peptide"
TSGMSVG

SEQ ID NO: 1218 - protein, 15 aa, Artificial Sequence
  source: /note="Description of Artificial Sequence: Synthetic peptide"
DIWWDDKKDYNPSLK

SEQ ID NO: 1219 - protein, 10 aa, Artificial Sequence
  source: /note="Description of Artificial Sequence: Synthetic peptide"
SMITNWYFDV

SEQ ID NO: 1220 - protein, 9 aa, Artificial Sequence
  source: /note="Description of Artificial Sequence: Synthetic peptide"
GFSLSTSGM

SEQ ID NO: 1221 - protein, 5 aa, Artificial Sequence
  source: /note="Description of Artificial Sequence: Synthetic peptide"
WWDDK

SEQ ID NO: 1222 - protein, 10 aa, Artificial Sequence
  source: /note="Description of Artificial Sequence: Synthetic peptide"
SMITNWYFDV

SEQ ID NO: 1223 - protein, 120 aa, Artificial Sequence; identical to SEQ ID NO: 55
  source: /note="Description of Artificial Sequence: Synthetic polypeptide"

SEQ ID NO: 1224 - protein, 450 aa, Artificial Sequence; identical to SEQ ID NO: 56
  source: /note="Description of Artificial Sequence: Synthetic polypeptide"

SEQ ID NO: 1225 - protein, 10 aa, Artificial Sequence
  source: /note="Description of Artificial Sequence: Synthetic peptide"
KAQLSVGYMH

SEQ ID NO: 1226 - protein, 181 aa, Artificial Sequence
  source: /note="Description of Artificial Sequence: Synthetic polypeptide"
DTTPLGPASSLPQSFLLKCLEQVRKIQGDGAALQEKLCATYKLCHPEELVLLGHSLGIPWAPLSSCPSQALQLAGCLSQLHSGLFLYQGLLQALEGISPELGPTLDTLQLDVADFATTIWQQMEELGMAPALQPTQGAMPAFASAFQRRAGGVLVASHLQSFLEVSYRVLRHLAQPSKLAS

SEQ ID NO: 1227 - protein, 9 aa, Artificial Sequence
  source: /note="Description of Artificial Sequence: Synthetic peptide"
FQGSGYPFT

SEQ ID NO: 1228 - protein, 6 aa, Artificial Sequence
  source: /note="Description of Artificial Sequence: Synthetic peptide"
QLSVGY

SEQ ID NO: 1229 - protein, 177 aa, Artificial Sequence
  source: /note="Description of Artificial Sequence: Synthetic polypeptide"
DTTPLGPASSLPQSFLLKCLEQVRKIQGDGAALQEKLCATYKLCHPEELVLLGHSLGIPWAPLSSCPSQALQLAGCLSQLHSGLFLYQGLLQALEGISPELGPTLDTLQLDVADFATTIWQQMEELGMAPALQPTQGAMPAFASAFQRRAGGVLVASHLQSFLEVSYRVLRHLAQPS

SEQ ID NO: 1230 - protein, 6 aa, Artificial Sequence
  source: /note="Description of Artificial Sequence: Synthetic peptide"
GSGYPF

SEQ ID NO: 1231 - protein, 280 aa, Artificial Sequence
  source: /note="Description of Artificial Sequence: Synthetic polypeptide"
DIQMTQSPSTLSASVGDRVTITCKAQLSVGYMHWYQQKPGKAPKLLIYDTTPLGPASSLPQSFLLKCLEQVRKIQGDGAALQEKLCATYKLCHPEELVLLGHSLGIPWAPLSSCPSQALQLAGCLSQLHSGLFLYQGLLQALEGISPELGPTLDTLQLDVADFATTIWQQMEELGMAPALQPTQGAMPAFASAFQRRAGGVLVASHLQSFLEVSYRVLRHLAQPSKLASGVPSRFSGSGSGTEFTLTISSLQPDDFATYYCFQGSGYPFTFGGGTKLEIK

SEQ ID NO: 1232 - protein, 387 aa, Artificial Sequence
  source: /note="Description of Artificial Sequence: Synthetic polypeptide"
DIQMTQSPSTLSASVGDRVTITCKAQLSVGYMHWYQQKPGKAPKLLIYDTTPLGPASSLPQSFLLKCLEQVRKIQGDGAALQEKLCATYKLCHPEELVLLGHSLGIPWAPLSSCPSQALQLAGCLSQLHSGLFLYQGLLQALEGISPELGPTLDTLQLDVADFATTIWQQMEELGMAPALQPTQGAMPAFASAFQRRAGGVLVASHLQSFLEVSYRVLRHLAQPSKLASGVPSRFSGSGSGTEFTLTISSLQPDDFATYYCFQGSGYPFTFGGGTKLEIKRTVAAPSVFIFPPSDEQLKSGTASVVCLLNNFYPREAKVQWKVDNALQSGNSQESVTEQDSKDSTYSLSSTLTLSKADYEKHKVYACEVTHQGLSSPVTKSFNRGEC

SEQ ID NO: 1233 - protein, 7 aa, Artificial Sequence
  source: /note="Description of Artificial Sequence: Synthetic peptide"
TSGMSVG

SEQ ID NO: 1234 - protein, 15 aa, Artificial Sequence
  source: /note="Description of Artificial Sequence: Synthetic peptide"
DIWWDDKKDYNPSLK

SEQ ID NO: 1235 - protein, 10 aa, Artificial Sequence
  source: /note="Description of Artificial Sequence: Synthetic peptide"
SMITNWYFDV

SEQ ID NO: 1236 - protein, 9 aa, Artificial Sequence
  source: /note="Description of Artificial Sequence: Synthetic peptide"
GFSLSTSGM

SEQ ID NO: 1237 - protein, 5 aa, Artificial Sequence
  source: /note="Description of Artificial Sequence: Synthetic peptide"
WWDDK

SEQ ID NO: 1238 - protein, 10 aa, Artificial Sequence
  source: /note="Description of Artificial Sequence: Synthetic peptide"
SMITNWYFDV

SEQ ID NO: 1239 - protein, 120 aa, Artificial Sequence; identical to SEQ ID NO: 55
  source: /note="Description of Artificial Sequence: Synthetic polypeptide"

SEQ ID NO: 1240 - protein, 450 aa, Artificial Sequence; identical to SEQ ID NO: 56
  source: /note="Description of Artificial Sequence: Synthetic polypeptide"

SEQ ID NO: 1241 - protein, 10 aa, Artificial Sequence
  source: /note="Description of Artificial Sequence: Synthetic peptide"
KAQLSVGYMH

SEQ ID NO: 1242 - protein, 7 aa, Artificial Sequence
  source: /note="Description of Artificial Sequence: Synthetic peptide"
DTSKLAS

SEQ ID NO: 1243 - protein, 183 aa, Artificial Sequence
  source: /note="Description of Artificial Sequence: Synthetic polypeptide"
FQGSGTPLGPASSLPQSFLLKCLEQVRKIQGDGAALQEKLCATYKLCHPEELVLLGHSLGIPWAPLSSCPSQALQLAGCLSQLHSGLFLYQGLLQALEGISPELGPTLDTLQLDVADFATTIWQQMEELGMAPALQPTQGAMPAFASAFQRRAGGVLVASHLQSFLEVSYRVLRHLAQPYPFT

SEQ ID NO: 1244 - protein, 6 aa, Artificial Sequence
  source: /note="Description of Artificial Sequence: Synthetic peptide"
QLSVGY

SEQ ID NO: 1245 - protein, 3 aa, Artificial Sequence
  source: /note="Description of Artificial Sequence: Synthetic peptide"
DTS

SEQ ID NO: 1246 - protein, 180 aa, Artificial Sequence
  source: /note="Description of Artificial Sequence: Synthetic polypeptide"
GSGTPLGPASSLPQSFLLKCLEQVRKIQGDGAALQEKLCATYKLCHPEELVLLGHSLGIPWAPLSSCPSQALQLAGCLSQLHSGLFLYQGLLQALEGISPELGPTLDTLQLDVADFATTIWQQMEELGMAPALQPTQGAMPAFASAFQRRAGGVLVASHLQSFLEVSYRVLRHLAQPYPF

SEQ ID NO: 1247 - protein, 280 aa, Artificial Sequence
  source: /note="Description of Artificial Sequence: Synthetic polypeptide"
DIQMTQSPSTLSASVGDRVTITCKAQLSVGYMHWYQQKPGKAPKLLIYDTSKLASGVPSRFSGSGSGTEFTLTISSLQPDDFATYYCFQGSGTPLGPASSLPQSFLLKCLEQVRKIQGDGAALQEKLCATYKLCHPEELVLLGHSLGIPWAPLSSCPSQALQLAGCLSQLHSGLFLYQGLLQALEGISPELGPTLDTLQLDVADFATTIWQQMEELGMAPALQPTQGAMPAFASAFQRRAGGVLVASHLQSFLEVSYRVLRHLAQPYPFTFGGGTKLEIK

SEQ ID NO: 1248 - protein, 387 aa, Artificial Sequence
  source: /note="Description of Artificial Sequence: Synthetic polypeptide"
DIQMTQSPSTLSASVGDRVTITCKAQLSVGYMHWYQQKPGKAPKLLIYDTSKLASGVPSRFSGSGSGTEFTLTISSLQPDDFATYYCFQGSGTPLGPASSLPQSFLLKCLEQVRKIQGDGAALQEKLCATYKLCHPEELVLLGHSLGIPWAPLSSCPSQALQLAGCLSQLHSGLFLYQGLLQALEGISPELGPTLDTLQLDVADFATTIWQQMEELGMAPALQPTQGAMPAFASAFQRRAGGVLVASHLQSFLEVSYRVLRHLAQPYPFTFGGGTKLEIKRTVAAPSVFIFPPSDEQLKSGTASVVCLLNNFYPREAKVQWKVDNALQSGNSQESVTEQDSKDSTYSLSSTLTLSKADYEKHKVYACEVTHQGLSSPVTKSFNRGEC

SEQ ID NO: 1249 - protein, 185 aa, Artificial Sequence
  source: /note="Description of Artificial Sequence: Synthetic polypeptide"
GPPPGPPRVSPDPRAELDSTVLLTRSLLADTRQLAAQLRDKFPADGDHNLDSLPTLAMSAGALGALQLPGVLTRLRADLLSYLRHVQWLRRAGGSSLKTLEPELGTLQARLDRLLRRLQLLMSRLALPQPPPDPPAPPLAPPSSAWGGIRAAHAILGGLHLTLDWAVRGLLLLKTRLSTSGMSVG

SEQ ID NO: 1250 - protein, 16 aa, Artificial Sequence
  source: /note="Description of Artificial Sequence: Synthetic peptide"
DIWWDDKKDYNPSLKS

SEQ ID NO: 1251 - protein, 10 aa, Artificial Sequence
  source: /note="Description of Artificial Sequence: Synthetic peptide"
SMITNWYFDV

SEQ ID NO: 1252 - protein, 187 aa, Artificial Sequence
  source: /note="Description of Artificial Sequence: Synthetic polypeptide"
GFSLPGPPPGPPRVSPDPRAELDSTVLLTRSLLADTRQLAAQLRDKFPADGDHNLDSLPTLAMSAGALGALQLPGVLTRLRADLLSYLRHVQWLRRAGGSSLKTLEPELGTLQARLDRLLRRLQLLMSRLALPQPPPDPPAPPLAPPSSAWGGIRAAHAILGGLHLTLDWAVRGLLLLKTRLSTSGM

SEQ ID NO: 1253 - protein, 5 aa, Artificial Sequence
  source: /note="Description of Artificial Sequence: Synthetic peptide"
WWDDK

SEQ ID NO: 1254 - protein, 10 aa, Artificial Sequence
  source: /note="Description of Artificial Sequence: Synthetic peptide"
SMITNWYFDV

SEQ ID NO: 1255 - protein, 298 aa, Artificial Sequence
  source: /note="Description of Artificial Sequence: Synthetic polypeptide"
QVTLRESGPALVKPTQTLTLTCTFSGFSLPGPPPGPPRVSPDPRAELDSTVLLTRSLLADTRQLAAQLRDKFPADGDHNLDSLPTLAMSAGALGALQLPGVLTRLRADLLSYLRHVQWLRRAGGSSLKTLEPELGTLQARLDRLLRRLQLLMSRLALPQPPPDPPAPPLAPPSSAWGGIRAAHAILGGLHLTLDWAVRGLLLLKTRLSTSGMSVGWIRQPPGKALEWLADIWWDDKKDYNPSLKSRLTISKDTSKNQVVLKVTNMDPADTATYYCARSMITNWYFDVWGAGTTVTVSS

SEQ ID NO: 1256 - protein, 628 aa, Artificial Sequence
  source: /note="Description of Artificial Sequence: Synthetic polypeptide"
QVTLRESGPALVKPTQTLTLTCTFSGFSLPGPPPGPPRVSPDPRAELDSTVLLTRSLLADTRQLAAQLRDKFPADGDHNLDSLPTLAMSAGALGALQLPGVLTRLRADLLSYLRHVQWLRRAGGSSLKTLEPELGTLQARLDRLLRRLQLLMSRLALPQPPPDPPAPPLAPPSSAWGGIRAAHAILGGLHLTLDWAVRGLLLLKTRLSTSGMSVGWIRQPPGKALEWLADIWWDDKKDYNPSLKSRLTISKDTSKNQVVLKVTNMDPADTATYYCARSMITNWYFDVWGAGTTVTVSSASTKGPSVFPLAPSSKSTSGGTAALGCLVKDYFPEPVTVSWNSGALTSGVHTFPAVLQSSGLYSLSSVVTVPSSSLGTQTYICNVNHKPSNTKVDKRVEPKSCDKTHTCPPCPAPELLGGPSVFLFPPKPKDTLMISRTPEVTCVVVAVSHEDPEVKFNWYVDGVEVHNAKTKPREEQYNSTYRVVSVLTVLHQDWLNGKEYKCKVSNKALAAPIEKTISKAKGQPREPQVYTLPPSREEMTKNQVSLTCLVKGFYPSDIAVEWESNGQPENNYKTTPPVLDSDGSFFLYSKLTVDKSRWQQGNVFSCSVMHEALHNHYTQKSLSLSPGK

SEQ ID NO: 1257 - protein, 10 aa, Artificial Sequence
  source: /note="Description of Artificial Sequence: Synthetic peptide"
KAQLSVGYMH

SEQ ID NO: 1258 - protein, 7 aa, Artificial Sequence
  source: /note="Description of Artificial Sequence: Synthetic peptide"
DTSKLAS

SEQ ID NO: 1259 - protein, 9 aa, Artificial Sequence
  source: /note="Description of Artificial Sequence: Synthetic peptide"
FQGSGYPFT

SEQ ID NO: 1260 - protein, 6 aa, Artificial Sequence
  source: /note="Description of Artificial Sequence: Synthetic peptide"
QLSVGY

SEQ ID NO: 1261 - protein, 3 aa, Artificial Sequence
  source: /note="Description of Artificial Sequence: Synthetic peptide"
DTS

SEQ ID NO: 1262 - protein, 6 aa, Artificial Sequence
  source: /note="Description of Artificial Sequence: Synthetic peptide"
GSGYPF

SEQ ID NO: 1263 - protein, 106 aa, Artificial Sequence; identical to SEQ ID NO: 15
  source: /note="Description of Artificial Sequence: Synthetic polypeptide"

SEQ ID NO: 1264 - protein, 213 aa, Artificial Sequence; identical to SEQ ID NO: 16
  source: /note="Description of Artificial Sequence: Synthetic polypeptide"

SEQ ID NO: 1265 - protein, 7 aa, Artificial Sequence
  source: /note="Description of Artificial Sequence: Synthetic peptide"
TSGMSVG

SEQ ID NO: 1266 - protein, 194 aa, Artificial Sequence
  source: /note="Description of Artificial Sequence: Synthetic polypeptide"
DIWWDPGPPPGPPRVSPDPRAELDSTVLLTRSLLADTRQLAAQLRDKFPADGDHNLDSLPTLAMSAGALGALQLPGVLTRLRADLLSYLRHVQWLRRAGGSSLKTLEPELGTLQARLDRLLRRLQLLMSRLALPQPPPDPPAPPLAPPSSAWGGIRAAHAILGGLHLTLDWAVRGLLLLKTRLDKKDYNPSLKS

SEQ ID NO: 1267 - protein, 10 aa, Artificial Sequence
  source: /note="Description of Artificial Sequence: Synthetic peptide"
SMITNWYFDV

SEQ ID NO: 1268 - protein, 9 aa, Artificial Sequence
  source: /note="Description of Artificial Sequence: Synthetic peptide"
GFSLSTSGM

SEQ ID NO: 1269 - protein, 183 aa, Artificial Sequence
  source: /note="Description of Artificial Sequence: Synthetic polypeptide"
WWDPGPPPGPPRVSPDPRAELDSTVLLTRSLLADTRQLAAQLRDKFPADGDHNLDSLPTLAMSAGALGALQLPGVLTRLRADLLSYLRHVQWLRRAGGSSLKTLEPELGTLQARLDRLLRRLQLLMSRLALPQPPPDPPAPPLAPPSSAWGGIRAAHAILGGLHLTLDWAVRGLLLLKTRLDK

SEQ ID NO: 1270 - protein, 10 aa, Artificial Sequence
  source: /note="Description of Artificial Sequence: Synthetic peptide"
SMITNWYFDV

SEQ ID NO: 1271 - protein, 298 aa, Artificial Sequence
  source: /note="Description of Artificial Sequence: Synthetic polypeptide"
QVTLRESGPALVKPTQTLTLTCTFSGFSLSTSGMSVGWIRQPPGKALEWLADIWWDPGPPPGPPRVSPDPRAELDSTVLLTRSLLADTRQLAAQLRDKFPADGDHNLDSLPTLAMSAGALGALQLPGVLTRLRADLLSYLRHVQWLRRAGGSSLKTLEPELGTLQARLDRLLRRLQLLMSRLALPQPPPDPPAPPLAPPSSAWGGIRAAHAILGGLHLTLDWAVRGLLLLKTRLDKKDYNPSLKSRLTISKDTSKNQVVLKVTNMDPADTATYYCARSMITNWYFDVWGAGTTVTVSS

SEQ ID NO: 1272 - protein, 628 aa, Artificial Sequence
  source: /note="Description of Artificial Sequence: Synthetic polypeptide"
QVTLRESGPALVKPTQTLTLTCTFSGFSLSTSGMSVGWIRQPPGKALEWLADIWWDPGPPPGPPRVSPDPRAELDSTVLLTRSLLADTRQLAAQLRDKFPADGDHNLDSLPTLAMSAGALGALQLPGVLTRLRADLLSYLRHVQWLRRAGGSSLKTLEPELGTLQARLDRLLRRLQLLMSRLALPQPPPDPPAPPLAPPSSAWGGIRAAHAILGGLHLTLDWAVRGLLLLKTRLDKKDYNPSLKSRLTISKDTSKNQVVLKVTNMDPADTATYYCARSMITNWYFDVWGAGTTVTVSSASTKGPSVFPLAPSSKSTSGGTAALGCLVKDYFPEPVTVSWNSGALTSGVHTFPAVLQSSGLYSLSSVVTVPSSSLGTQTYICNVNHKPSNTKVDKRVEPKSCDKTHTCPPCPAPELLGGPSVFLFPPKPKDTLMISRTPEVTCVVVAVSHEDPEVKFNWYVDGVEVHNAKTKPREEQYNSTYRVVSVLTVLHQDWLNGKEYKCKVSNKALAAPIEKTISKAKGQPREPQVYTLPPSREEMTKNQVSLTCLVKGFYPSDIAVEWESNGQPENNYKTTPPVLDSDGSFFLYSKLTVDKSRWQQGNVFSCSVMHEALHNHYTQKSLSLSPGK

SEQ ID NO: 1273 - protein, 10 aa, Artificial Sequence
  source: /note="Description of Artificial Sequence: Synthetic peptide"
KAQLSVGYMH

SEQ ID NO: 1274 - protein, 7 aa, Artificial Sequence
  source: /note="Description of Artificial Sequence: Synthetic peptide"
DTSKLAS

SEQ ID NO: 1275 - protein, 9 aa, Artificial Sequence
  source: /note="Description of Artificial Sequence: Synthetic peptide"
FQGSGYPFT

SEQ ID NO: 1276 - protein, 6 aa, Artificial Sequence
  source: /note="Description of Artificial Sequence: Synthetic peptide"
QLSVGY

SEQ ID NO: 1277 - protein, 3 aa, Artificial Sequence
  source: /note="Description of Artificial Sequence: Synthetic peptide"
DTS

SEQ ID NO: 1278 - protein, 6 aa, Artificial Sequence
  source: /note="Description of Artificial Sequence: Synthetic peptide"
GSGYPF

SEQ ID NO: 1279 - protein, 106 aa, Artificial Sequence; identical to SEQ ID NO: 15
  source: /note="Description of Artificial Sequence: Synthetic polypeptide"

SEQ ID NO: 1280 - protein, 213 aa, Artificial Sequence; identical to SEQ ID NO: 16
  source: /note="Description of Artificial Sequence: Synthetic polypeptide"

SEQ ID NO: 1281 - protein, 7 aa, Artificial Sequence
  source: /note="Description of Artificial Sequence: Synthetic peptide"
TSGMSVG

SEQ ID NO: 1282 - protein, 16 aa, Artificial Sequence
  source: /note="Description of Artificial Sequence: Synthetic peptide"
DIWWDDKKDYNPSLKS

SEQ ID NO: 1283 - protein, 188 aa, Artificial Sequence
  source: /note="Description of Artificial Sequence: Synthetic polypeptide"
SMITPGPPPGPPRVSPDPRAELDSTVLLTRSLLADTRQLAAQLRDKFPADGDHNLDSLPTLAMSAGALGALQLPGVLTRLRADLLSYLRHVQWLRRAGGSSLKTLEPELGTLQARLDRLLRRLQLLMSRLALPQPPPDPPAPPLAPPSSAWGGIRAAHAILGGLHLTLDWAVRGLLLLKTRLNWYFDV

SEQ ID NO: 1284 - protein, 9 aa, Artificial Sequence
  source: /note="Description of Artificial Sequence: Synthetic peptide"
GFSLSTSGM

SEQ ID NO: 1285 - protein, 5 aa, Artificial Sequence
  source: /note="Description of Artificial Sequence: Synthetic peptide"
WWDDK

SEQ ID NO: 1286 - protein, 188 aa, Artificial Sequence; identical to SEQ ID NO: 1283
  source: /note="Description of Artificial Sequence: Synthetic polypeptide"

SEQ ID NO: 1287 - protein, 298 aa, Artificial Sequence
  source: /note="Description of Artificial Sequence: Synthetic polypeptide"
QVTLRESGPALVKPTQTLTLTCTFSGFSLSTSGMSVGWIRQPPGKALEWLADIWWDDKKDYNPSLKSRLTISKDTSKNQVVLKVTNMDPADTATYYCARSMITPGPPPGPPRVSPDPRAELDSTVLLTRSLLADTRQLAAQLRDKFPADGDHNLDSLPTLAMSAGALGALQLPGVLTRLRADLLSYLRHVQWLRRAGGSSLKTLEPELGTLQARLDRLLRRLQLLMSRLALPQPPPDPPAPPLAPPSSAWGGIRAAHAILGGLHLTLDWAVRGLLLLKTRLNWYFDVWGAGTTVTVSS

SEQ ID NO: 1288 - protein, 628 aa, Artificial Sequence
  source: /note="Description of Artificial Sequence: Synthetic polypeptide"
QVTLRESGPALVKPTQTLTLTCTFSGFSLSTSGMSVGWIRQPPGKALEWLADIWWDDKKDYNPSLKSRLTISKDTSKNQVVLKVTNMDPADTATYYCARSMITPGPPPGPPRVSPDPRAELDSTVLLTRSLLADTRQLAAQLRDKFPADGDHNLDSLPTLAMSAGALGALQLPGVLTRLRADLLSYLRHVQWLRRAGGSSLKTLEPELGTLQARLDRLLRRLQLLMSRLALPQPPPDPPAPPLAPPSSAWGGIRAAHAILGGLHLTLDWAVRGLLLLKTRLNWYFDVWGAGTTVTVSSASTKGPSVFPLAPSSKSTSGGTAALGCLVKDYFPEPVTVSWNSGALTSGVHTFPAVLQSSGLYSLSSVVTVPSSSLGTQTYICNVNHKPSNTKVDKRVEPKSCDKTHTCPPCPAPELLGGPSVFLFPPKPKDTLMISRTPEVTCVVVAVSHEDPEVKFNWYVDGVEVHNAKTKPREEQYNSTYRVVSVLTVLHQDWLNGKEYKCKVSNKALAAPIEKTISKAKGQPREPQVYTLPPSREEMTKNQVSLTCLVKGFYPSDIAVEWESNGQPENNYKTTPPVLDSDGSFFLYSKLTVDKSRWQQGNVFSCSVMHEALHNHYTQKSLSLSPGK

SEQ ID NO: 1289 - protein, 10 aa, Artificial Sequence
  source: /note="Description of Artificial Sequence: Synthetic peptide"
KAQLSVGYMH

SEQ ID NO: 1290 - protein, 7 aa, Artificial Sequence
  source: /note="Description of Artificial Sequence: Synthetic peptide"
DTSKLAS

SEQ ID NO: 1291 - protein, 9 aa, Artificial Sequence
  source: /note="Description of Artificial Sequence: Synthetic peptide"
FQGSGYPFT

SEQ ID NO: 1292 - protein, 6 aa, Artificial Sequence
  source: /note="Description of Artificial Sequence: Synthetic peptide"
QLSVGY

SEQ ID NO: 1293 - protein, 3 aa, Artificial Sequence
  source: /note="Description of Artificial Sequence: Synthetic peptide"
DTS

SEQ ID NO: 1294 - protein, 6 aa, Artificial Sequence
  source: /note="Description of Artificial Sequence: Synthetic peptide"
GSGYPF

SEQ ID NO: 1295 - protein, 106 aa, Artificial Sequence; identical to SEQ ID NO: 15
  source: /note="Description of Artificial Sequence: Synthetic polypeptide"

SEQ ID NO: 1296 - protein, 213 aa, Artificial Sequence; identical to SEQ ID NO: 16
  source: /note="Description of Artificial Sequence: Synthetic polypeptide"

SEQ ID NO: 1297 - protein, 7 aa, Artificial Sequence
  source: /note="Description of Artificial Sequence: Synthetic peptide"
TSGMSVG

SEQ ID NO: 1298 - protein, 15 aa, Artificial Sequence
  source: /note="Description of Artificial Sequence: Synthetic peptide"
DIWWDDKKDYNPSLK

SEQ ID NO: 1299 - protein, 10 aa, Artificial Sequence
  source: /note="Description of Artificial Sequence: Synthetic peptide"
SMITNWYFDV

SEQ ID NO: 1300 - protein, 9 aa, Artificial Sequence
  source: /note="Description of Artificial Sequence: Synthetic peptide"
GFSLSTSGM

SEQ ID NO: 1301 - protein, 5 aa, Artificial Sequence
  source: /note="Description of Artificial Sequence: Synthetic peptide"
WWDDK

SEQ ID NO: 1302 - protein, 10 aa, Artificial Sequence
  source: /note="Description of Artificial Sequence: Synthetic peptide"
SMITNWYFDV

SEQ ID NO: 1303 - protein, 120 aa, Artificial Sequence; identical to SEQ ID NO: 55
  source: /note="Description of Artificial Sequence: Synthetic polypeptide"

SEQ ID NO: 1304 - protein, 450 aa, Artificial Sequence; identical to SEQ ID NO: 56
  source: /note="Description of Artificial Sequence: Synthetic polypeptide"

SEQ ID NO: 1305 - protein, 188 aa, Artificial Sequence
  source: /note="Description of Artificial Sequence: Synthetic polypeptide"
KAQLSPGPPPGPPRVSPDPRAELDSTVLLTRSLLADTRQLAAQLRDKFPADGDHNLDSLPTLAMSAGALGALQLPGVLTRLRADLLSYLRHVQWLRRAGGSSLKTLEPELGTLQARLDRLLRRLQLLMSRLALPQPPPDPPAPPLAPPSSAWGGIRAAHAILGGLHLTLDWAVRGLLLLKTRLVGYMH

SEQ ID NO: 1306 - protein, 7 aa, Artificial Sequence
  source: /note="Description of Artificial Sequence: Synthetic peptide"
DTSKLAS

SEQ ID NO: 1307 - protein, 9 aa, Artificial Sequence
  source: /note="Description of Artificial Sequence: Synthetic peptide"
FQGSGYPFT

SEQ ID NO: 1308 - protein, 184 aa, Artificial Sequence
  source: /note="Description of Artificial Sequence: Synthetic polypeptide"
QLSPGPPPGPPRVSPDPRAELDSTVLLTRSLLADTRQLAAQLRDKFPADGDHNLDSLPTLAMSAGALGALQLPGVLTRLRADLLSYLRHVQWLRRAGGSSLKTLEPELGTLQARLDRLLRRLQLLMSRLALPQPPPDPPAPPLAPPSSAWGGIRAAHAILGGLHLTLDWAVRGLLLLKTRLVGY

SEQ ID NO: 1309 - protein, 3 aa, Artificial Sequence
  source: /note="Description of Artificial Sequence: Synthetic peptide"
DTS

SEQ ID NO: 1310 - protein, 6 aa, Artificial Sequence
  source: /note="Description of Artificial Sequence: Synthetic peptide"
GSGYPF

SEQ ID NO: 1311 - protein, 284 aa, Artificial Sequence
  source: /note="Description of Artificial Sequence: Synthetic polypeptide"
DIQMTQSPSTLSASVGDRVTITCKAQLSPGPPPGPPRVSPDPRAELDSTVLLTRSLLADTRQLAAQLRDKFPADGDHNLDSLPTLAMSAGALGALQLPGVLTRLRADLLSYLRHVQWLRRAGGSSLKTLEPELGTLQARLDRLLRRLQLLMSRLALPQPPPDPPAPPLAPPSSAWGGIRAAHAILGGLHLTLDWAVRGLLLLKTRLVGYMHWYQQKPGKAPKLLIYDTSKLASGVPSRFSGSGSGTEFTLTISSLQPDDFATYYCFQGSGYPFTFGGGTKLEIK

SEQ ID NO: 1312 - protein, 391 aa, Artificial Sequence
  source: /note="Description of Artificial Sequence: Synthetic polypeptide"
DIQMTQSPSTLSASVGDRVTITCKAQLSPGPPPGPPRVSPDPRAELDSTVLLTRSLLADTRQLAAQLRDKFPADGDHNLDSLPTLAMSAGALGALQLPGVLTRLRADLLSYLRHVQWLRRAGGSSLKTLEPELGTLQARLDRLLRRLQLLMSRLALPQPPPDPPAPPLAPPSSAWGGIRAAHAILGGLHLTLDWAVRGLLLLKTRLVGYMHWYQQKPGKAPKLLIYDTSKLASGVPSRFSGSGSGTEFTLTISSLQPDDFATYYCFQGSGYPFTFGGGTKLEIKRTVAAPSVFIFPPSDEQLKSGTASVVCLLNNFYPREAKVQWKVDNALQSGNSQESVTEQDSKDSTYSLSSTLTLSKADYEKHKVYACEVTHQGLSSPVTKSFNRGEC

SEQ ID NO: 1313 - protein, 7 aa, Artificial Sequence
  source: /note="Description of Artificial Sequence: Synthetic peptide"
TSGMSVG

SEQ ID NO: 1314 - protein, 15 aa, Artificial Sequence
  source: /note="Description of Artificial Sequence: Synthetic peptide"
DIWWDDKKDYNPSLK

SEQ ID NO: 1315 - protein, 10 aa, Artificial Sequence
  source: /note="Description of Artificial Sequence: Synthetic peptide"
SMITNWYFDV

SEQ ID NO: 1316 - protein, 9 aa, Artificial Sequence
  source: /note="Description of Artificial Sequence: Synthetic peptide"
GFSLSTSGM

SEQ ID NO: 1317 - protein, 5 aa, Artificial Sequence
  source: /note="Description of Artificial Sequence: Synthetic peptide"
WWDDK

SEQ ID NO: 1318 - protein, 10 aa, Artificial Sequence
  source: /note="Description of Artificial Sequence: Synthetic peptide"
SMITNWYFDV

SEQ ID NO: 1319 - protein, 120 aa, Artificial Sequence; identical to SEQ ID NO: 55
  source: /note="Description of Artificial Sequence: Synthetic polypeptide"

SEQ ID NO: 1320 - protein, 450 aa, Artificial Sequence; identical to SEQ ID NO: 56
  source: /note="Description of Artificial Sequence: Synthetic polypeptide"

SEQ ID NO: 1321 - protein, 10 aa, Artificial Sequence
  source: /note="Description of Artificial Sequence: Synthetic peptide"
KAQLSVGYMH

SEQ ID NO: 1322 - protein, 185 aa, Artificial Sequence
  source: /note="Description of Artificial Sequence: Synthetic polypeptide"
DTPGPPPGPPRVSPDPRAELDSTVLLTRSLLADTRQLAAQLRDKFPADGDHNLDSLPTLAMSAGALGALQLPGVLTRLRADLLSYLRHVQWLRRAGGSSLKTLEPELGTLQARLDRLLRRLQLLMSRLALPQPPPDPPAPPLAPPSSAWGGIRAAHAILGGLHLTLDWAVRGLLLLKTRLSKLAS

SEQ ID NO: 1323 - protein, 9 aa, Artificial Sequence
  source: /note="Description of Artificial Sequence: Synthetic peptide"
FQGSGYPFT

SEQ ID NO: 1324 - protein, 6 aa, Artificial Sequence
  source: /note="Description of Artificial Sequence: Synthetic peptide"
QLSVGY

SEQ ID NO: 1325 - protein, 181 aa, Artificial Sequence
  source: /note="Description of Artificial Sequence: Synthetic polypeptide"
DTPGPPPGPPRVSPDPRAELDSTVLLTRSLLADTRQLAAQLRDKFPADGDHNLDSLPTLAMSAGALGALQLPGVLTRLRADLLSYLRHVQWLRRAGGSSLKTLEPELGTLQARLDRLLRRLQLLMSRLALPQPPPDPPAPPLAPPSSAWGGIRAAHAILGGLHLTLDWAVRGLLLLKTRLS

SEQ ID NO: 1326 - protein, 6 aa, Artificial Sequence
  source: /note="Description of Artificial Sequence: Synthetic peptide"
GSGYPF

SEQ ID NO: 1327 - protein, 284 aa, Artificial Sequence
  source: /note="Description of Artificial Sequence: Synthetic polypeptide"
DIQMTQSPSTLSASVGDRVTITCKAQLSVGYMHWYQQKPGKAPKLLIYDTPGPPPGPPRVSPDPRAELDSTVLLTRSLLADTRQLAAQLRDKFPADGDHNLDSLPTLAMSAGALGALQLPGVLTRLRADLLSYLRHVQWLRRAGGSSLKTLEPELGTLQARLDRLLRRLQLLMSRLALPQPPPDPPAPPLAPPSSAWGGIRAAHAILGGLHLTLDWAVRGLLLLKTRLSKLASGVPSRFSGSGSGTEFTLTISSLQPDDFATYYCFQGSGYPFTFGGGTKLEIK

SEQ ID NO: 1328 - protein, 391 aa, Artificial Sequence
  source: /note="Description of Artificial Sequence: Synthetic polypeptide"
DIQMTQSPSTLSASVGDRVTITCKAQLSVGYMHWYQQKPGKAPKLLIYDTPGPPPGPPRVSPDPRAELDSTVLLTRSLLADTRQLAAQLRDKFPADGDHNLDSLPTLAMSAGALGALQLPGVLTRLRADLLSYLRHVQWLRRAGGSSLKTLEPELGTLQARLDRLLRRLQLLMSRLALPQPPPDPPAPPLAPPSSAWGGIRAAHAILGGLHLTLDWAVRGLLLLKTRLSKLASGVPSRFSGSGSGTEFTLTISSLQPDDFATYYCFQGSGYPFTFGGGTKLEIKRTVAAPSVFIFPPSDEQLKSGTASVVCLLNNFYPREAKVQWKVDNALQSGNSQESVTEQDSKDSTYSLSSTLTLSKADYEKHKVYACEVTHQGLSSPVTKSFNRGEC

SEQ ID NO: 1329 - protein, 7 aa, Artificial Sequence
  source: /note="Description of Artificial Sequence: Synthetic peptide"
TSGMSVG

SEQ ID NO: 1330 - protein, 15 aa, Artificial Sequence
  source: /note="Description of Artificial Sequence: Synthetic peptide"
DIWWDDKKDYNPSLK

SEQ ID NO: 1331 - protein, 10 aa, Artificial Sequence
  source: /note="Description of Artificial Sequence: Synthetic peptide"
SMITNWYFDV

SEQ ID NO: 1332 - protein, 9 aa, Artificial Sequence
  source: /note="Description of Artificial Sequence: Synthetic peptide"
GFSLSTSGM

SEQ ID NO: 1333 - protein, 5 aa, Artificial Sequence
  source: /note="Description of Artificial Sequence: Synthetic peptide"
WWDDK

SEQ ID NO: 1334 - protein, 10 aa, Artificial Sequence
  source: /note="Description of Artificial Sequence: Synthetic peptide"
SMITNWYFDV

SEQ ID NO: 1335 - protein, 120 aa, Artificial Sequence; identical to SEQ ID NO: 55
  source: /note="Description of Artificial Sequence: Synthetic polypeptide"

SEQ ID NO: 1336 - protein, 450 aa, Artificial Sequence; identical to SEQ ID NO: 56
  source: /note="Description of Artificial Sequence: Synthetic polypeptide"

SEQ ID NO: 1337 - protein, 10 aa, Artificial Sequence
  source: /note="Description of Artificial Sequence: Synthetic peptide"
KAQLSVGYMH

SEQ ID NO: 1338 - protein, 7 aa, Artificial Sequence
  source: /note="Description of Artificial Sequence: Synthetic peptide"
DTSKLAS

SEQ ID NO: 1339 - protein, 187 aa, Artificial Sequence
  source: /note="Description of Artificial Sequence: Synthetic polypeptide"
FQGSGPGPPPGPPRVSPDPRAELDSTVLLTRSLLADTRQLAAQLRDKFPADGDHNLDSLPTLAMSAGALGALQLPGVLTRLRADLLSYLRHVQWLRRAGGSSLKTLEPELGTLQARLDRLLRRLQLLMSRLALPQPPPDPPAPPLAPPSSAWGGIRAAHAILGGLHLTLDWAVRGLLLLKTRLYPFT

SEQ ID NO: 1340 - protein, 6 aa, Artificial Sequence
  source: /note="Description of Artificial Sequence: Synthetic peptide"
QLSVGY

SEQ ID NO: 1341 - protein, 3 aa, Artificial Sequence
  source: /note="Description of Artificial Sequence: Synthetic peptide"
DTS

SEQ ID NO: 1342 - protein, 184 aa, Artificial Sequence
  source: /note="Description of Artificial Sequence: Synthetic polypeptide"
GSGPGPPPGPPRVSPDPRAELDSTVLLTRSLLADTRQLAAQLRDKFPADGDHNLDSLPTLAMSAGALGALQLPGVLTRLRADLLSYLRHVQWLRRAGGSSLKTLEPELGTLQARLDRLLRRLQLLMSRLALPQPPPDPPAPPLAPPSSAWGGIRAAHAILGGLHLTLDWAVRGLLLLKTRLYPF

SEQ ID NO: 1343 - protein, 284 aa, Artificial Sequence
  source: /note="Description of Artificial Sequence: Synthetic polypeptide"
DIQMTQSPSTLSASVGDRVTITCKAQLSVGYMHWYQQKPGKAPKLLIYDTSKLASGVPSRFSGSGSGTEFTLTISSLQPDDFATYYCFQGSGPGPPPGPPRVSPDPRAELDSTVLLTRSLLADTRQLAAQLRDKFPADGDHNLDSLPTLAMSAGALGALQLPGVLTRLRADLLSYLRHVQWLRRAGGSSLKTLEPELGTLQARLDRLLRRLQLLMSRLALPQPPPDPPAPPLAPPSSAWGGIRAAHAILGGLHLTLDWAVRGLLLLKTRLYPFTFGGGTKLEIK

SEQ ID NO: 1344 - protein, 391 aa, Artificial Sequence
  source: /note="Description of Artificial Sequence: Synthetic polypeptide"
DIQMTQSPSTLSASVGDRVTITCKAQLSVGYMHWYQQKPGKAPKLLIYDTSKLASGVPSRFSGSGSGTEFTLTISSLQPDDFATYYCFQGSGPGPPPGPPRVSPDPRAELDSTVLLTRSLLADTRQLAAQLRDKFPADGDHNLDSLPTLAMSAGALGALQLPGVLTRLRADLLSYLRHVQWLRRAGGSSLKTLEPELGTLQARLDRLLRRLQLLMSRLALPQPPPDPPAPPLAPPSSAWGGIRAAHAILGGLHLTLDWAVRGLLLLKTRLYPFTFGGGTKLEIKRTVAAPSVFIFPPSDEQLKSGTASVVCLLNNFYPREAKVQWKVDNALQSGNSQESVTEQDSKDSTYSLSSTLTLSKADYEKHKVYACEVTHQGLSSPVTKSFNRGEC

SEQ ID NO: 1345 - protein, 187 aa, Artificial Sequence
  source: /note="Description of Artificial Sequence: Synthetic polypeptide"
PLPITPVNATCAIRHPCHNNLMNQIRSQLAQLNGSANALFILYYTAQGEPFPNNLDKLCGPNVTDFPPFHANGTEKAKLVELYRIVVYLGTSLGNITRDQKILNPSALSLHSKLNATADILRGLLSNVLCRLCSKYHVGHVDVTYGPDTSGKDVFQKKKLGCQLLGKYKQIIAVLAQAFSTSGMSVG

SEQ ID NO: 1346 - protein, 16 aa, Artificial Sequence
  source: /note="Description of Artificial Sequence: Synthetic peptide"
DIWWDDKKDYNPSLKS

SEQ ID NO: 1347 - protein, 10 aa, Artificial Sequence
  source: /note="Description of Artificial Sequence: Synthetic peptide"
SMITNWYFDV

SEQ ID NO: 1348 - protein, 189 aa, Artificial Sequence
  source: /note="Description of Artificial Sequence: Synthetic polypeptide"
GFSLSPLPITPVNATCAIRHPCHNNLMNQIRSQLAQLNGSANALFILYYTAQGEPFPNNLDKLCGPNVTDFPPFHANGTEKAKLVELYRIVVYLGTSLGNITRDQKILNPSALSLHSKLNATADILRGLLSNVLCRLCSKYHVGHVDVTYGPDTSGKDVFQKKKLGCQLLGKYKQIIAVLAQAFSTSGM

SEQ ID NO: 1349 - protein, 5 aa, Artificial Sequence
  source: /note="Description of Artificial Sequence: Synthetic peptide"
WWDDK

SEQ ID NO: 1350 - protein, 10 aa, Artificial Sequence
  source: /note="Description of Artificial Sequence: Synthetic peptide"
SMITNWYFDV

SEQ ID NO: 1351 - protein, 300 aa, Artificial Sequence
  source: /note="Description of Artificial Sequence: Synthetic polypeptide"
QVTLRESGPALVKPTQTLTLTCTFSGFSLSPLPITPVNATCAIRHPCHNNLMNQIRSQLAQLNGSANALFILYYTAQGEPFPNNLDKLCGPNVTDFPPFHANGTEKAKLVELYRIVVYLGTSLGNITRDQKILNPSALSLHSKLNATADILRGLLSNVLCRLCSKYHVGHVDVTYGPDTSGKDVFQKKKLGCQLLGKYKQIIAVLAQAFSTSGMSVGWIRQPPGKALEWLADIWWDDKKDYNPSLKSRLTISKDTSKNQVVLKVTNMDPADTATYYCARSMITNWYFDVWGAGTTVTVSS

SEQ ID NO: 1352 - protein, 630 aa, Artificial Sequence
  source: /note="Description of Artificial Sequence: Synthetic polypeptide"
QVTLRESGPALVKPTQTLTLTCTFSGFSLSPLPITPVNATCAIRHPCHNNLMNQIRSQLAQLNGSANALFILYYTAQGEPFPNNLDKLCGPNVTDFPPFHANGTEKAKLVELYRIVVYLGTSLGNITRDQKILNPSALSLHSKLNATADILRGLLSNVLCRLCSKYHVGHVDVTYGPDTSGKDVFQKKKLGCQLLGKYKQIIAVLAQAFSTSGMSVGWIRQPPGKALEWLADIWWDDKKDYNPSLKSRLTISKDTSKNQVVLKVTNMDPADTATYYCARSMITNWYFDVWGAGTTVTVSSASTKGPSVFPLAPSSKSTSGGTAALGCLVKDYFPEPVTVSWNSGALTSGVHTFPAVLQSSGLYSLSSVVTVPSSSLGTQTYICNVNHKPSNTKVDKRVEPKSCDKTHTCPPCPAPELLGGPSVFLFPPKPKDTLMISRTPEVTCVVVAVSHEDPEVKFNWYVDGVEVHNAKTKPREEQYNSTYRVVSVLTVLHQDWLNGKEYKCKVSNKALAAPIEKTISKAKGQPREPQVYTLPPSREEMTKNQVSLTCLVKGFYPSDIAVEWESNGQPENNYKTTPPVLDSDGSFFLYSKLTVDKSRWQQGNVFSCSVMHEALHNHYTQKSLSLSPGK

SEQ ID NO: 1353 - protein, 10 aa, Artificial Sequence
  source: /note="Description of Artificial Sequence: Synthetic peptide"
KAQLSVGYMH

SEQ ID NO: 1354 - protein, 7 aa, Artificial Sequence
  source: /note="Description of Artificial Sequence: Synthetic peptide"
DTSKLAS

SEQ ID NO: 1355 - protein, 9 aa, Artificial Sequence
  source: /note="Description of Artificial Sequence: Synthetic peptide"
FQGSGYPFT

SEQ ID NO: 1356 - protein, 6 aa, Artificial Sequence
  source: /note="Description of Artificial Sequence: Synthetic peptide"
QLSVGY

SEQ ID NO: 1357 - protein, 3 aa, Artificial Sequence
  source: /note="Description of Artificial Sequence: Synthetic peptide"
DTS

SEQ ID NO: 1358 - protein, 6 aa, Artificial Sequence
  source: /note="Description of Artificial Sequence: Synthetic peptide"
GSGYPF

SEQ ID NO: 1359 - protein, 106 aa, Artificial Sequence; identical to SEQ ID NO: 15
  source: /note="Description of Artificial Sequence: Synthetic polypeptide"

SEQ ID NO: 1360 - protein, 213 aa, Artificial Sequence; identical to SEQ ID NO: 16
  source: /note="Description of Artificial Sequence: Synthetic polypeptide"

SEQ ID NO: 1361 - protein, 7 aa, Artificial Sequence
  source: /note="Description of Artificial Sequence: Synthetic peptide"
TSGMSVG

SEQ ID NO: 1362 - protein, 196 aa, Artificial Sequence
  source: /note="Description of Artificial Sequence: Synthetic polypeptide"
DIWWDSPLPITPVNATCAIRHPCHNNLMNQIRSQLAQLNGSANALFILYYTAQGEPFPNNLDKLCGPNVTDFPPFHANGTEKAKLVELYRIVVYLGTSLGNITRDQKILNPSALSLHSKLNATADILRGLLSNVLCRLCSKYHVGHVDVTYGPDTSGKDVFQKKKLGCQLLGKYKQIIAVLAQAFDKKDYNPSLKS

SEQ ID NO: 1363 - protein, 10 aa, Artificial Sequence
  source: /note="Description of Artificial Sequence: Synthetic peptide"
SMITNWYFDV

SEQ ID NO: 1364 - protein, 9 aa, Artificial Sequence
  source: /note="Description of Artificial Sequence: Synthetic peptide"
GFSLSTSGM

SEQ ID NO: 1365 - protein, 185 aa, Artificial Sequence
  source: /note="Description of Artificial Sequence: Synthetic polypeptide"
WWDSPLPITPVNATCAIRHPCHNNLMNQIRSQLAQLNGSANALFILYYTAQGEPFPNNLDKLCGPNVTDFPPFHANGTEKAKLVELYRIVVYLGTSLGNITRDQKILNPSALSLHSKLNATADILRGLLSNVLCRLCSKYHVGHVDVTYGPDTSGKDVFQKKKLGCQLLGKYKQIIAVLAQAFDK

SEQ ID NO: 1366 - protein, 10 aa, Artificial Sequence
  source: /note="Description of Artificial Sequence: Synthetic peptide"
SMITNWYFDV

SEQ ID NO: 1367 - protein, 300 aa, Artificial Sequence
  source: /note="Description of Artificial Sequence: Synthetic polypeptide"
QVTLRESGPALVKPTQTLTLTCTFSGFSLSTSGMSVGWIRQPPGKALEWLADIWWDSPLPITPVNATCAIRHPCHNNLMNQIRSQLAQLNGSANALFILYYTAQGEPFPNNLDKLCGPNVTDFPPFHANGTEKAKLVELYRIVVYLGTSLGNITRDQKILNPSALSLHSKLNATADILRGLLSNVLCRLCSKYHVGHVDVTYGPDTSGKDVFQKKKLGCQLLGKYKQIIAVLAQAFDKKDYNPSLKSRLTISKDTSANQVVLKVTNMDPADTATYYCARSMITNWYFDVWGAGTTVTVSS

SEQ ID NO: 1368 - protein, 630 aa, Artificial Sequence
  source: /note="Description of Artificial Sequence: Synthetic polypeptide"
QVTLRESGPALVKPTQTLTLTCTFSGFSLSTSGMSVGWIRQPPGKALEWLADIWWDSPLPITPVNATCAIRHPCHNNLMNQIRSQLAQLNGSANALFILYYTAQGEPFPNNLDKLCGPNVTDFPPFHANGTEKAKLVELYRIVVYLGTSLGNITRDQKILNPSALSLHSKLNATADILRGLLSNVLCRLCSKYHVGHVDVTYGPDTSGKDVFQKKKLGCQLLGKYKQIIAVLAQAFDKKDYNPSLKSRLTISKDTSANQVVLKVTNMDPADTATYYCARSMITNWYFDVWGAGTTVTVSSASTKGPSVFPLAPSSKSTSGGTAALGCLVKDYFPEPVTVSWNSGALTSGVHTFPAVLQSSGLYSLSSVVTVPSSSLGTQTYICNVNHKPSNTKVDKRVEPKSCDKTHTCPPCPAPELLGGPSVFLFPPKPKDTLMISRTPEVTCVVVAVSHEDPEVKFNWYVDGVEVHNAKTKPREEQYNSTYRVVSVLTVLHQDWLNGKEYKCKVSNKALAAPIEKTISKAKGQPREPQVYTLPPSREEMTKNQVSLTCLVKGFYPSDIAVEWESNGQPENNYKTTPPVLDSDGSFFLYSKLTVDKSRWQQGNVFSCSVMHEALHNHYTQKSLSLSPGK

SEQ ID NO: 1369 - protein, 10 aa, Artificial Sequence
  source: /note="Description of Artificial Sequence: Synthetic peptide"
KAQLSVGYMH

SEQ ID NO: 1370 - protein, 7 aa, Artificial Sequence
  source: /note="Description of Artificial Sequence: Synthetic peptide"
DTSKLAS

SEQ ID NO: 1371 - protein, 9 aa, Artificial Sequence
  source: /note="Description of Artificial Sequence: Synthetic peptide"
FQGSGYPFT

SEQ ID NO: 1372 - protein, 6 aa, Artificial Sequence
  source: /note="Description of Artificial Sequence: Synthetic peptide"
QLSVGY

SEQ ID NO: 1373 - protein, 3 aa, Artificial Sequence
  source: /note="Description of Artificial Sequence: Synthetic peptide"
DTS

SEQ ID NO: 1374 - protein, 6 aa, Artificial Sequence
  source: /note="Description of Artificial Sequence: Synthetic peptide"
GSGYPF

SEQ ID NO: 1375 - protein, 106 aa, Artificial Sequence; identical to SEQ ID NO: 15
  source: /note="Description of Artificial Sequence: Synthetic polypeptide"

SEQ ID NO: 1376 - protein, 213 aa, Artificial Sequence; identical to SEQ ID NO: 16
  source: /note="Description of Artificial Sequence: Synthetic polypeptide"

SEQ ID NO: 1377 - protein, 7 aa, Artificial Sequence
  source: /note="Description of Artificial Sequence: Synthetic peptide"
TSGMSVG

SEQ ID NO: 1378 - protein, 16 aa, Artificial Sequence
  source: /note="Description of Artificial Sequence: Synthetic peptide"
DIWWDDKKDYNPSLKS

SEQ ID NO: 1379 - protein, 190 aa, Artificial Sequence
  source: /note="Description of Artificial Sequence: Synthetic polypeptide"
SMITSPLPITPVNATCAIRHPCHNNLMNQIRSQLAQLNGSANALFILYYTAQGEPFPNNLDKLCGPNVTDFPPFHANGTEKAKLVELYRIVVYLGTSLGNITRDQKILNPSALSLHSKLNATADILRGLLSNVLCRLCSKYHVGHVDVTYGPDTSGKDVFQKKKLGCQLLGKYKQIIAVLAQAFNWYFDV

SEQ ID NO: 1380 - protein, 9 aa, Artificial Sequence
  source: /note="Description of Artificial Sequence: Synthetic peptide"
GFSLSTSGM

SEQ ID NO: 1381 - protein, 5 aa, Artificial Sequence
  source: /note="Description of Artificial Sequence: Synthetic peptide"
WWDDK

SEQ ID NO: 1382 - protein, 190 aa, Artificial Sequence; identical to SEQ ID NO: 1379
  source: /note="Description of Artificial Sequence: Synthetic polypeptide"

SEQ ID NO: 1383 - protein, 300 aa, Artificial Sequence
  source: /note="Description of Artificial Sequence: Synthetic polypeptide"
QVTLRESGPALVKPTQTLTLTCTFSGFSLSTSGMSVGWIRQPPGKALEWLADIWWDDKKDYNPSLKSRLTISKDTSANQVVLKVTNMDPADTATYYCARSMITSPLPITPVNATCAIRHPCHNNLMNQIRSQLAQLNGSANALFILYYTAQGEPFPNNLDKLCGPNVTDFPPFHANGTEKAKLVELYRIVVYLGTSLGNITRDQKILNPSALSLHSKLNATADILRGLLSNVLCRLCSKYHVGHVDVTYGPDTSGKDVFQKKKLGCQLLGKYKQIIAVLAQAFNWYFDVWGAGTTVTVSS

SEQ ID NO: 1384 - protein, 630 aa, Artificial Sequence
  source: /note="Description of Artificial Sequence: Synthetic polypeptide"
QVTLRESGPALVKPTQTLTLTCTFSGFSLSTSGMSVGWIRQPPGKALEWLADIWWDDKKDYNPSLKSRLTISKDTSANQVVLKVTNMDPADTATYYCARSMITSPLPITPVNATCAIRHPCHNNLMNQIRSQLAQLNGSANALFILYYTAQGEPFPNNLDKLCGPNVTDFPPFHANGTEKAKLVELYRIVVYLGTSLGNITRDQKILNPSALSLHSKLNATADILRGLLSNVLCRLCSKYHVGHVDVTYGPDTSGKDVFQKKKLGCQLLGKYKQIIAVLAQAFNWYFDVWGAGTTVTVSSASTKGPSVFPLAPSSKSTSGGTAALGCLVKDYFPEPVTVSWNSGALTSGVHTFPAVLQSSGLYSLSSVVTVPSSSLGTQTYICNVNHKPSNTKVDKRVEPKSCDKTHTCPPCPAPELLGGPSVFLFPPKPKDTLMISRTPEVTCVVVAVSHEDPEVKFNWYVDGVEVHNAKTKPREEQYNSTYRVVSVLTVLHQDWLNGKEYKCKVSNKALAAPIEKTISKAKGQPREPQVYTLPPSREEMTKNQVSLTCLVKGFYPSDIAVEWESNGQPENNYKTTPPVLDSDGSFFLYSKLTVDKSRWQQGNVFSCSVMHEALHNHYTQKSLSLSPGK

SEQ ID NO: 1385 - protein, 10 aa, Artificial Sequence
  source: /note="Description of Artificial Sequence: Synthetic peptide"
KAQLSVGYMH

SEQ ID NO: 1386 - protein, 7 aa, Artificial Sequence
  source: /note="Description of Artificial Sequence: Synthetic peptide"
DTSKLAS

SEQ ID NO: 1387 - protein, 9 aa, Artificial Sequence
  source: /note="Description of Artificial Sequence: Synthetic peptide"
FQGSGYPFT

SEQ ID NO: 1388 - protein, 6 aa, Artificial Sequence
  source: /note="Description of Artificial Sequence: Synthetic peptide"
QLSVGY

SEQ ID NO: 1389 - protein, 3 aa, Artificial Sequence
  source: /note="Description of Artificial Sequence: Synthetic peptide"
DTS

SEQ ID NO: 1390 - protein, 6 aa, Artificial Sequence
  source: /note="Description of Artificial Sequence: Synthetic peptide"
GSGYPF

SEQ ID NO: 1391 - protein, 106 aa, Artificial Sequence; identical to SEQ ID NO: 15
  source: /note="Description of Artificial Sequence: Synthetic polypeptide"

SEQ ID NO: 1392 - protein, 213 aa, Artificial Sequence; identical to SEQ ID NO: 16
  source: /note="Description of Artificial Sequence: Synthetic polypeptide"

SEQ ID NO: 1393 - protein, 7 aa, Artificial Sequence
  source: /note="Description of Artificial Sequence: Synthetic peptide"
TSGMSVG

SEQ ID NO: 1394 - protein, 15 aa, Artificial Sequence
  source: /note="Description of Artificial Sequence: Synthetic peptide"
DIWWDDKKDYNPSLK

SEQ ID NO: 1395 - protein, 10 aa, Artificial Sequence
  source: /note="Description of Artificial Sequence: Synthetic peptide"
SMITNWYFDV

SEQ ID NO: 1396 - protein, 9 aa, Artificial Sequence
  source: /note="Description of Artificial Sequence: Synthetic peptide"
GFSLSTSGM

SEQ ID NO: 1397 - protein, 5 aa, Artificial Sequence
  source: /note="Description of Artificial Sequence: Synthetic peptide"
WWDDK

SEQ ID NO: 1398 - protein, 10 aa, Artificial Sequence
  source: /note="Description of Artificial Sequence: Synthetic peptide"
SMITNWYFDV

SEQ ID NO: 1399 - protein, 120 aa, Artificial Sequence; identical to SEQ ID NO: 55
  source: /note="Description of Artificial Sequence: Synthetic polypeptide"

SEQ ID NO: 1400 - protein, 450 aa, Artificial Sequence; identical to SEQ ID NO: 56
  source: /note="Description of Artificial Sequence: Synthetic polypeptide"

SEQ ID NO: 1401 - protein, 190 aa, Artificial Sequence
  source: /note="Description of Artificial Sequence: Synthetic polypeptide"
KAQLSSPLPITPVNATCAIRHPCHNNLMNQIRSQLAQLNGSANALFILYYTAQGEPFPNNLDKLCGPNVTDFPPFHANGTEKAKLVELYRIVVYLGTSLGNITRDQKILNPSALSLHSKLNATADILRGLLSNVLCRLCSKYHVGHVDVTYGPDTSGKDVFQKKKLGCQLLGKYKQIIAVLAQAFVGYMH

SEQ ID NO: 1402 - protein, 7 aa, Artificial Sequence
  source: /note="Description of Artificial Sequence: Synthetic peptide"
DTSKLAS

SEQ ID NO: 1403 - protein, 9 aa, Artificial Sequence
  source: /note="Description of Artificial Sequence: Synthetic peptide"
FQGSGYPFT

SEQ ID NO: 1404 - protein, 186 aa, Artificial Sequence
  source: /note="Description of Artificial Sequence: Synthetic polypeptide"
QLSSPLPITPVNATCAIRHPCHNNLMNQIRSQLAQLNGSANALFILYYTAQGEPFPNNLDKLCGPNVTDFPPFHANGTEKAKLVELYRIVVYLGTSLGNITRDQKILNPSALSLHSKLNATADILRGLLSNVLCRLCSKYHVGHVDVTYGPDTSGKDVFQKKKLGCQLLGKYKQIIAVLAQAFVGY

SEQ ID NO: 1405 - protein, 3 aa, Artificial Sequence
  source: /note="Description of Artificial Sequence: Synthetic peptide"
DTS

SEQ ID NO: 1406 - protein, 6 aa, Artificial Sequence
  source: /note="Description of Artificial Sequence: Synthetic peptide"
GSGYPF

SEQ ID NO: 1407 - protein, 286 aa, Artificial Sequence
  source: /note="Description of Artificial Sequence: Synthetic polypeptide"
DIQMTQSPSTLSASVGDRVTITCKAQLSSPLPITPVNATCAIRHPCHNNLMNQIRSQLAQLNGSANALFILYYTAQGEPFPNNLDKLCGPNVTDFPPFHANGTEKAKLVELYRIVVYLGTSLGNITRDQKILNPSALSLHSKLNATADILRGLLSNVLCRLCSKYHVGHVDVTYGPDTSGKDVFQKKKLGCQLLGKYKQIIAVLAQAFVGYMHWYQQKPGKAPKLLIYDTSKLASGVPSRFSGSGSGTEFTLTISSLQPDDFATYYCFQGSGYPFTFGGGTKLEIK

SEQ ID NO: 1408 - protein, 393 aa, Artificial Sequence
  source: /note="Description of Artificial Sequence: Synthetic polypeptide"
DIQMTQSPSTLSASVGDRVTITCKAQLSSPLPITPVNATCAIRHPCHNNLMNQIRSQLAQLNGSANALFILYYTAQGEPFPNNLDKLCGPNVTDFPPFHANGTEKAKLVELYRIVVYLGTSLGNITRDQKILNPSALSLHSKLNATADILRGLLSNVLCRLCSKYHVGHVDVTYGPDTSGKDVFQKKKLGCQLLGKYKQIIAVLAQAFVGYMHWYQQKPGKAPKLLIYDTSKLASGVPSRFSGSGSGTEFTLTISSLQPDDFATYYCFQGSGYPFTFGGGTKLEIKRTVAAPSVFIFPPSDEQLKSGTASVVCLLNNFYPREAKVQWKVDNALQSGNSQESVTEQDSKDSTYSLSSTLTLSKADYEKHKVYACEVTHQGLSSPVTKSFNRGEC

SEQ ID NO: 1409 - protein, 7 aa, Artificial Sequence
  source: /note="Description of Artificial Sequence: Synthetic peptide"
TSGMSVG

SEQ ID NO: 1410 - protein, 15 aa, Artificial Sequence
  source: /note="Description of Artificial Sequence: Synthetic peptide"
DIWWDDKKDYNPSLK

SEQ ID NO: 1411 - protein, 10 aa, Artificial Sequence
  source: /note="Description of Artificial Sequence: Synthetic peptide"
SMITNWYFDV

SEQ ID NO: 1412 - protein, 9 aa, Artificial Sequence
  source: /note="Description of Artificial Sequence: Synthetic peptide"
GFSLSTSGM

SEQ ID NO: 1413 - protein, 5 aa, Artificial Sequence
  source: /note="Description of Artificial Sequence: Synthetic peptide"
WWDDK

SEQ ID NO: 1414 - protein, 10 aa, Artificial Sequence
  source: /note="Description of Artificial Sequence: Synthetic peptide"
SMITNWYFDV

SEQ ID NO: 1415 - protein, 120 aa, Artificial Sequence; identical to SEQ ID NO: 55
  source: /note="Description of Artificial Sequence: Synthetic polypeptide"

SEQ ID NO: 1416 - protein, 450 aa, Artificial Sequence; identical to SEQ ID NO: 56
  source: /note="Description of Artificial Sequence: Synthetic polypeptide"

SEQ ID NO: 1417 - protein, 10 aa, Artificial Sequence
  source: /note="Description of Artificial Sequence: Synthetic peptide"
KAQLSVGYMH

SEQ ID NO: 1418 - protein, 187 aa, Artificial Sequence
  source: /note="Description of Artificial Sequence: Synthetic polypeptide"
DTSPLPITPVNATCAIRHPCHNNLMNQIRSQLAQLNGSANALFILYYTAQGEPFPNNLDKLCGPNVTDFPPFHANGTEKAKLVELYRIVVYLGTSLGNITRDQKILNPSALSLHSKLNATADILRGLLSNVLCRLCSKYHVGHVDVTYGPDTSGKDVFQKKKLGCQLLGKYKQIIAVLAQAFSKLAS

SEQ ID NO: 1419 - protein, 9 aa, Artificial Sequence
  source: /note="Description of Artificial Sequence: Synthetic peptide"
FQGSGYPFT

SEQ ID NO: 1420 - protein, 6 aa, Artificial Sequence
  source: /note="Description of Artificial Sequence: Synthetic peptide"
QLSVGY

SEQ ID NO: 1421 - protein, 183 aa, Artificial Sequence
  source: /note="Description of Artificial Sequence: Synthetic polypeptide"
DTSPLPITPVNATCAIRHPCHNNLMNQIRSQLAQLNGSANALFILYYTAQGEPFPNNLDKLCGPNVTDFPPFHANGTEKAKLVELYRIVVYLGTSLGNITRDQKILNPSALSLHSKLNATADILRGLLSNVLCRLCSKYHVGHVDVTYGPDTSGKDVFQKKKLGCQLLGKYKQIIAVLAQAFS

SEQ ID NO: 1422 - protein, 6 aa, Artificial Sequence
  source: /note="Description of Artificial Sequence: Synthetic peptide"
GSGYPF

SEQ ID NO: 1423 - protein, 286 aa, Artificial Sequence
  source: /note="Description of Artificial Sequence: Synthetic polypeptide"
DIQMTQSPSTLSASVGDRVTITCKAQLSVGYMHWYQQKPGKAPKLLIYDTSPLPITPVNATCAIRHPCHNNLMNQIRSQLAQLNGSANALFILYYTAQGEPFPNNLDKLCGPNVTDFPPFHANGTEKAKLVELYRIVVYLGTSLGNITRDQKILNPSALSLHSKLNATADILRGLLSNVLCRLCSKYHVGHVDVTYGPDTSGKDVFQKKKLGCQLLGKYKQIIAVLAQAFSKLASGVPSRFSGSGSGTEFTLTISSLQPDDFATYYCFQGSGYPFTFGGGTKLEIK

SEQ ID NO: 1424 - protein, 393 aa, Artificial Sequence
  source: /note="Description of Artificial Sequence: Synthetic polypeptide"
DIQMTQSPSTLSASVGDRVTITCKAQLSVGYMHWYQQKPGKAPKLLIYDTSPLPITPVNATCAIRHPCHNNLMNQIRSQLAQLNGSANALFILYYTAQGEPFPNNLDKLCGPNVTDFPPFHANGTEKAKLVELYRIVVYLGTSLGNITRDQKILNPSALSLHSKLNATADILRGLLSNVLCRLCSKYHVGHVDVTYGPDTSGKDVFQKKKLGCQLLGKYKQIIAVLAQAFSKLASGVPSRFSGSGSGTEFTLTISSLQPDDFATYYCFQGSGYPFTFGGGTKLEIKRTVAAPSVFIFPPSDEQLKSGTASVVCLLNNFYPREAKVQWKVDNALQSGNSQESVTEQDSKDSTYSLSSTLTLSKADYEKHKVYACEVTHQGLSSPVTKSFNRGEC

SEQ ID NO: 1425 - protein, 7 aa, Artificial Sequence
  source: /note="Description of Artificial Sequence: Synthetic peptide"
TSGMSVG

SEQ ID NO: 1426 - protein, 15 aa, Artificial Sequence
  source: /note="Description of Artificial Sequence: Synthetic peptide"
DIWWDDKKDYNPSLK

SEQ ID NO: 1427 - protein, 10 aa, Artificial Sequence
  source: /note="Description of Artificial Sequence: Synthetic peptide"
SMITNWYFDV

SEQ ID NO: 1428 - protein, 9 aa, Artificial Sequence
  source: /note="Description of Artificial Sequence: Synthetic peptide"
GFSLSTSGM

SEQ ID NO: 1429 - protein, 5 aa, Artificial Sequence
  source: /note="Description of Artificial Sequence: Synthetic peptide"
WWDDK

SEQ ID NO: 1430 - protein, 10 aa, Artificial Sequence
  source: /note="Description of Artificial Sequence: Synthetic peptide"
SMITNWYFDV

SEQ ID NO: 1431 - protein, 120 aa, Artificial Sequence; identical to SEQ ID NO: 55
  source: /note="Description of Artificial Sequence: Synthetic polypeptide"

SEQ ID NO: 1432 - protein, 450 aa, Artificial Sequence; identical to SEQ ID NO: 56
  source: /note="Description of Artificial Sequence: Synthetic polypeptide"

SEQ ID NO: 1433 - protein, 10 aa, Artificial Sequence
  source: /note="Description of Artificial Sequence: Synthetic peptide"
KAQLSVGYMH

SEQ ID NO: 1434 - protein, 7 aa, Artificial Sequence
  source: /note="Description of Artificial Sequence: Synthetic peptide"
DTSKLAS

SEQ ID NO: 1435 - protein, 189 aa, Artificial Sequence
  source: /note="Description of Artificial Sequence: Synthetic polypeptide"
FQGSGSPLPITPVNATCAIRHPCHNNLMNQIRSQLAQLNGSANALFILYYTAQGEPFPNNLDKLCGPNVTDFPPFHANGTEKAKLVELYRIVVYLGTSLGNITRDQKILNPSALSLHSKLNATADILRGLLSNVLCRLCSKYHVGHVDVTYGPDTSGKDVFQKKKLGCQLLGKYKQIIAVLAQAFYPFT

SEQ ID NO: 1436 - protein, 6 aa, Artificial Sequence
  source: /note="Description of Artificial Sequence: Synthetic peptide"
QLSVGY

SEQ ID NO: 1437 - protein, 3 aa, Artificial Sequence
  source: /note="Description of Artificial Sequence: Synthetic peptide"
DTS

SEQ ID NO: 1438 - protein, 186 aa, Artificial Sequence
  source: /note="Description of Artificial Sequence: Synthetic polypeptide"
GSGSPLPITPVNATCAIRHPCHNNLMNQIRSQLAQLNGSANALFILYYTAQGEPFPNNLDKLCGPNVTDFPPFHANGTEKAKLVELYRIVVYLGTSLGNITRDQKILNPSALSLHSKLNATADILRGLLSNVLCRLCSKYHVGHVDVTYGPDTSGKDVFQKKKLGCQLLGKYKQIIAVLAQAFYPF

SEQ ID NO: 1439 - protein, 286 aa, Artificial Sequence
  source: /note="Description of Artificial Sequence: Synthetic polypeptide"
DIQMTQSPSTLSASVGDRVTITCKAQLSVGYMHWYQQKPGKAPKLLIYDTSKLASGVPSRFSGSGSGTEFTLTISSLQPDDFATYYCFQGSGSPLPITPVNATCAIRHPCHNNLMNQIRSQLAQLNGSANALFILYYTAQGEPFPNNLDKLCGPNVTDFPPFHANGTEKAKLVELYRIVVYLGTSLGNITRDQKILNPSALSLHSKLNATADILRGLLSNVLCRLCSKYHVGHVDVTYGPDTSGKDVFQKKKLGCQLLGKYKQIIAVLAQAFYPFTFGGGTKLEIK

SEQ ID NO: 1440 - protein, 393 aa, Artificial Sequence
  source: /note="Description of Artificial Sequence: Synthetic polypeptide"
DIQMTQSPSTLSASVGDRVTITCKAQLSVGYMHWYQQKPGKAPKLLIYDTSKLASGVPSRFSGSGSGTEFTLTISSLQPDDFATYYCFQGSGSPLPITPVNATCAIRHPCHNNLMNQIRSQLAQLNGSANALFILYYTAQGEPFPNNLDKLCGPNVTDFPPFHANGTEKAKLVELYRIVVYLGTSLGNITRDQKILNPSALSLHSKLNATADILRGLLSNVLCRLCSKYHVGHVDVTYGPDTSGKDVFQKKKLGCQLLGKYKQIIAVLAQAFYPFTFGGGTKLEIKRTVAAPSVFIFPPSDEQLKSGTASVVCLLNNFYPREAKVQWKVDNALQSGNSQESVTEQDSKDSTYSLSSTLTLSKADYEKHKVYACEVTHQGLSSPVTKSFNRGEC

SEQ ID NO: 1441 - protein, 207 aa, Artificial Sequence
  source: /note="Description of Artificial Sequence: Synthetic polypeptide"
LPICPGGAARCQVTLRDLFDRAVVLSHYIHNLSSEMFSEFDKRYTHGRGFITKAINSCHTSSLATPEDKEQAQQMNQKDFLSLIVSILRSWNEPLYHLVTEVRGMQEAPEAILSKAVEIEEQTKRLLEGMELIVSQVHPETKENEIYPVWSGLPSLQMADEESRLSAYYNLLHCLRRDSHKIDNYLKLLKCRIIHNNNCSTSGMSVG

SEQ ID NO: 1442 - protein, 16 aa, Artificial Sequence
  source: /note="Description of Artificial Sequence: Synthetic peptide"
DIWWDDKKDYNPSLKS

SEQ ID NO: 1443 - protein, 10 aa, Artificial Sequence
  source: /note="Description of Artificial Sequence: Synthetic peptide"
SMITNWYFDV

SEQ ID NO: 1444 - protein, 209 aa, Artificial Sequence
  source: /note="Description of Artificial Sequence: Synthetic polypeptide"
GFSLPLPICPGGAARCQVTLRDLFDRAVVLSHYIHNLSSEMFSEFDKRYTHGRGFITKAINSCHTSSLATPEDKEQAQQMNQKDFLSLIVSILRSWNEPLYHLVTEVRGMQEAPEAILSKAVEIEEQTKRLLEGMELIVSQVHPETKENEIYPVWSGLPSLQMADEESRLSAYYNLLHCLRRDSHKIDNYLKLLKCRIIHNNNCSTSGM

SEQ ID NO: 1445 - protein, 5 aa, Artificial Sequence
  source: /note="Description of Artificial Sequence: Synthetic peptide"
WWDDK

SEQ ID NO: 1446 - protein, 10 aa, Artificial Sequence
  source: /note="Description of Artificial Sequence: Synthetic peptide"
SMITNWYFDV

SEQ ID NO: 1447 - protein, 320 aa, Artificial Sequence
  source: /note="Description of Artificial Sequence: Synthetic polypeptide"
QVTLRESGPALVKPTQTLTLTCTFSGFSLPLPICPGGAARCQVTLRDLFDRAVVLSHYIHNLSSEMFSEFDKRYTHGRGFITKAINSCHTSSLATPEDKEQAQQMNQKDFLSLIVSILRSWNEPLYHLVTEVRGMQEAPEAILSKAVEIEEQTKRLLEGMELIVSQVHPETKENEIYPVWSGLPSLQMADEESRLSAYYNLLHCLRRDSHKIDNYLKLLKCRIIHNNNCSTSGMSVGWIRQPPGKALEWLADIWWDDKKDYNPSLKSRLTISKDTSKNQVVLKVTNMDPADTATYYCARSMITNWYFDVWGAGTTVTVSS

SEQ ID NO: 1448 - protein, 650 aa, Artificial Sequence
  source: /note="Description of Artificial Sequence: Synthetic polypeptide"
QVTLRESGPALVKPTQTLTLTCTFSGFSLPLPICPGGAARCQVTLRDLFDRAVVLSHYIHNLSSEMFSEFDKRYTHGRGFITKAINSCHTSSLATPEDKEQAQQMNQKDFLSLIVSILRSWNEPLYHLVTEVRGMQEAPEAILSKAVEIEEQTKRLLEGMELIVSQVHPETKENEIYPVWSGLPSLQMADEESRLSAYYNLLHCLRRDSHKIDNYLKLLKCRIIHNNNCSTSGMSVGWIRQPPGKALEWLADIWWDDKKDYNPSLKSRLTISKDTSKNQVVLKVTNMDPADTATYYCARSMITNWYFDVWGAGTTVTVSSASTKGPSVFPLAPSSKSTSGGTAALGCLVKDYFPEPVTVSWNSGALTSGVHTFPAVLQSSGLYSLSSVVTVPSSSLGTQTYICNVNHKPSNTKVDKRVEPKSCDKTHTCPPCPAPELLGGPSVFLFPPKPKDTLMISRTPEVTCVVVAVSHEDPEVKFNWYVDGVEVHNAKTKPREEQYNSTYRVVSVLTVLHQDWLNGKEYKCKVSNKALAAPIEKTISKAKGQPREPQVYTLPPSREEMTKNQVSLTCLVKGFYPSDIAVEWESNGQPENNYKTTPPVLDSDGSFFLYSKLTVDKSRWQQGNVFSCSVMHEALHNHYTQKSLSLSPGK

SEQ ID NO: 1449 - protein, 10 aa, Artificial Sequence
  source: /note="Description of Artificial Sequence: Synthetic peptide"
KAQLSVGYMH

SEQ ID NO: 1450 - protein, 7 aa, Artificial Sequence
  source: /note="Description of Artificial Sequence: Synthetic peptide"
DTSKLAS

SEQ ID NO: 1451 - protein, 9 aa, Artificial Sequence
  source: /note="Description of Artificial Sequence: Synthetic peptide"
FQGSGYPFT

SEQ ID NO: 1452 - protein, 6 aa, Artificial Sequence
  source: /note="Description of Artificial Sequence: Synthetic peptide"
QLSVGY

SEQ ID NO: 1453 - protein, 3 aa, Artificial Sequence
  source: /note="Description of Artificial Sequence: Synthetic peptide"
DTS

SEQ ID NO: 1454 - protein, 6 aa, Artificial Sequence
  source: /note="Description of Artificial Sequence: Synthetic peptide"
GSGYPF

SEQ ID NO: 1455 - protein, 106 aa, Artificial Sequence; identical to SEQ ID NO: 15
  source: /note="Description of Artificial Sequence: Synthetic polypeptide"

SEQ ID NO: 1456 - protein, 213 aa, Artificial Sequence; identical to SEQ ID NO: 16
  source: /note="Description of Artificial Sequence: Synthetic polypeptide"

SEQ ID NO: 1457 - protein, 7 aa, Artificial Sequence
  source: /note="Description of Artificial Sequence: Synthetic peptide"
TSGMSVG

SEQ ID NO: 1458 - protein, 216 aa, Artificial Sequence
  source: /note="Description of Artificial Sequence: Synthetic polypeptide"
DIWWDPLPICPGGAARCQVTLRDLFDRAVVLSHYIHNLSSEMFSEFDKRYTHGRGFITKAINSCHTSSLATPEDKEQAQQMNQKDFLSLIVSILRSWNEPLYHLVTEVRGMQEAPEAILSKAVEIEEQTKRLLEGMELIVSQVHPETKENEIYPVWSGLPSLQMADEESRLSAYYNLLHCLRRDSHKIDNYLKLLKCRIIHNNNCDKKDYNPSLKS

SEQ ID NO: 1459 - protein, 10 aa, Artificial Sequence
  source: /note="Description of Artificial Sequence: Synthetic peptide"
SMITNWYFDV

SEQ ID NO: 1460 - protein, 9 aa, Artificial Sequence
  source: /note="Description of Artificial Sequence: Synthetic peptide"
GFSLSTSGM

SEQ ID NO: 1461 - protein, 205 aa, Artificial Sequence
  source: /note="Description of Artificial Sequence: Synthetic polypeptide"
WWDPLPICPGGAARCQVTLRDLFDRAVVLSHYIHNLSSEMFSEFDKRYTHGRGFITKAINSCHTSSLATPEDKEQAQQMNQKDFLSLIVSILRSWNEPLYHLVTEVRGMQEAPEAILSKAVEIEEQTKRLLEGMELIVSQVHPETKENEIYPVWSGLPSLQMADEESRLSAYYNLLHCLRRDSHKIDNYLKLLKCRIIHNNNCDK

SEQ ID NO: 1462 - protein, 10 aa, Artificial Sequence
  source: /note="Description of Artificial Sequence: Synthetic peptide"
SMITNWYFDV

SEQ ID NO: 1463 - protein, 320 aa, Artificial Sequence
  source: /note="Description of Artificial Sequence: Synthetic polypeptide"
QVTLRESGPALVKPTQTLTLTCTFSGFSLSTSGMSVGWIRQPPGKALEWLADIWWDPLPICPGGAARCQVTLRDLFDRAVVLSHYIHNLSSEMFSEFDKRYTHGRGFITKAINSCHTSSLATPEDKEQAQQMNQKDFLSLIVSILRSWNEPLYHLVTEVRGMQEAPEAILSKAVEIEEQTKRLLEGMELIVSQVHPETKENEIYPVWSGLPSLQMADEESRLSAYYNLLHCLRRDSHKIDNYLKLLKCRIIHNNNCDKKDYNPSLKSRLTISKDTSKNQVVLKVTNMDPADTATYYCARSMITNWYFDVWGAGTTVTVSS

SEQ ID NO: 1464 - protein, 650 aa, Artificial Sequence
  source: /note="Description of Artificial Sequence: Synthetic polypeptide"
QVTLRESGPALVKPTQTLTLTCTFSGFSLSTSGMSVGWIRQPPGKALEWLADIWWDPLPICPGGAARCQVTLRDLFDRAVVLSHYIHNLSSEMFSEFDKRYTHGRGFITKAINSCHTSSLATPEDKEQAQQMNQKDFLSLIVSILRSWNEPLYHLVTEVRGMQEAPEAILSKAVEIEEQTKRLLEGMELIVSQVHPETKENEIYPVWSGLPSLQMADEESRLSAYYNLLHCLRRDSHKIDNYLKLLKCRIIHNNNCDKKDYNPSLKSRLTISKDTSKNQVVLKVTNMDPADTATYYCARSMITNWYFDVWGAGTTVTVSSASTKGPSVFPLAPSSKSTSGGTAALGCLVKDYFPEPVTVSWNSGALTSGVHTFPAVLQSSGLYSLSSVVTVPSSSLGTQTYICNVNHKPSNTKVDKRVEPKSCDKTHTCPPCPAPELLGGPSVFLFPPKPKDTLMISRTPEVTCVVVAVSHEDPEVKFNWYVDGVEVHNAKTKPREEQYNSTYRVVSVLTVLHQDWLNGKEYKCKVSNKALAAPIEKTISKAKGQPREPQVYTLPPSREEMTKNQVSLTCLVKGFYPSDIAVEWESNGQPENNYKTTPPVLDSDGSFFLYSKLTVDKSRWQQGNVFSCSVMHEALHNHYTQKSLSLSPGK

SEQ ID NO: 1465 - protein, 10 aa, Artificial Sequence
  source: /note="Description of Artificial Sequence: Synthetic peptide"
KAQLSVGYMH

SEQ ID NO: 1466 - protein, 7 aa, Artificial Sequence
  source: /note="Description of Artificial Sequence: Synthetic peptide"
DTSKLAS

SEQ ID NO: 1467 - protein, 9 aa, Artificial Sequence
  source: /note="Description of Artificial Sequence: Synthetic peptide"
FQGSGYPFT

SEQ ID NO: 1468 - protein, 6 aa, Artificial Sequence
  source: /note="Description of Artificial Sequence: Synthetic peptide"
QLSVGY

SEQ ID NO: 1469 - protein, 3 aa, Artificial Sequence
  source: /note="Description of Artificial Sequence: Synthetic peptide"
DTS

SEQ ID NO: 1470 - protein, 6 aa, Artificial Sequence
  source: /note="Description of Artificial Sequence: Synthetic peptide"
GSGYPF

SEQ ID NO: 1471 - protein, 106 aa, Artificial Sequence; identical to SEQ ID NO: 15
  source: /note="Description of Artificial Sequence: Synthetic polypeptide"

SEQ ID NO: 1472 - protein, 213 aa, Artificial Sequence; identical to SEQ ID NO: 16
  source: /note="Description of Artificial Sequence: Synthetic polypeptide"

SEQ ID NO: 1473 - protein, 7 aa, Artificial Sequence
  source: /note="Description of Artificial Sequence: Synthetic peptide"
TSGMSVG

SEQ ID NO: 1474 - protein, 16 aa, Artificial Sequence
  source: /note="Description of Artificial Sequence: Synthetic peptide"
DIWWDDKKDYNPSLKS

SEQ ID NO: 1475 - protein, 210 aa, Artificial Sequence
  source: /note="Description of Artificial Sequence: Synthetic polypeptide"
SMITPLPICPGGAARCQVTLRDLFDRAVVLSHYIHNLSSEMFSEFDKRYTHGRGFITKAINSCHTSSLATPEDKEQAQQMNQKDFLSLIVSILRSWNEPLYHLVTEVRGMQEAPEAILSKAVEIEEQTKRLLEGMELIVSQVHPETKENEIYPVWSGLPSLQMADEESRLSAYYNLLHCLRRDSHKIDNYLKLLKCRIIHNNNCNWYFDV

SEQ ID NO: 1476 - protein, 9 aa, Artificial Sequence
  source: /note="Description of Artificial Sequence: Synthetic peptide"
GFSLSTSGM

SEQ ID NO: 1477 - protein, 5 aa, Artificial Sequence
  source: /note="Description of Artificial Sequence: Synthetic peptide"
WWDDK

SEQ ID NO: 1478 - protein, 210 aa, Artificial Sequence; identical to SEQ ID NO: 1475
  source: /note="Description of Artificial Sequence: Synthetic polypeptide"

SEQ ID NO: 1479 - protein, 320 aa, Artificial Sequence
  source: /note="Description of Artificial Sequence: Synthetic polypeptide"
QVTLRESGPALVKPTQTLTLTCTFSGFSLSTSGMSVGWIRQPPGKALEWLADIWWDDKKDYNPSLKSRLTISKDTSKNQVVLKVTNMDPADTATYYCARSMITPLPICPGGAARCQVTLRDLFDRAVVLSHYIHNLSSEMFSEFDKRYTHGRGFITKAINSCHTSSLATPEDKEQAQQMNQKDFLSLIVSILRSWNEPLYHLVTEVRGMQEAPEAILSKAVEIEEQTKRLLEGMELIVSQVHPETKENEIYPVWSGLPSLQMADEESRLSAYYNLLHCLRRDSHKIDNYLKLLKCRIIHNNNCNWYFDVWGAGTTVTVSS

SEQ ID NO: 1480 - protein, 650 aa, Artificial Sequence
  source: /note="Description of Artificial Sequence: Synthetic polypeptide"
QVTLRESGPALVKPTQTLTLTCTFSGFSLSTSGMSVGWIRQPPGKALEWLADIWWDDKKDYNPSLKSRLTISKDTSKNQVVLKVTNMDPADTATYYCARSMITPLPICPGGAARCQVTLRDLFDRAVVLSHYIHNLSSEMFSEFDKRYTHGRGFITKAINSCHTSSLATPEDKEQAQQMNQKDFLSLIVSILRSWNEPLYHLVTEVRGMQEAPEAILSKAVEIEEQTKRLLEGMELIVSQVHPETKENEIYPVWSGLPSLQMADEESRLSAYYNLLHCLRRDSHKIDNYLKLLKCRIIHNNNCNWYFDVWGAGTTVTVSSASTKGPSVFPLAPSSKSTSGGTAALGCLVKDYFPEPVTVSWNSGALTSGVHTFPAVLQSSGLYSLSSVVTVPSSSLGTQTYICNVNHKPSNTKVDKRVEPKSCDKTHTCPPCPAPELLGGPSVFLFPPKPKDTLMISRTPEVTCVVVAVSHEDPEVKFNWYVDGVEVHNAKTKPREEQYNSTYRVVSVLTVLHQDWLNGKEYKCKVSNKALAAPIEKTISKAKGQPREPQVYTLPPSREEMTKNQVSLTCLVKGFYPSDIAVEWESNGQPENNYKTTPPVLDSDGSFFLYSKLTVDKSRWQQGNVFSCSVMHEALHNHYTQKSLSLSPGK

SEQ ID NO: 1481 - protein, 10 aa, Artificial Sequence
  source: /note="Description of Artificial Sequence: Synthetic peptide"
KAQLSVGYMH

SEQ ID NO: 1482 - protein, 7 aa, Artificial Sequence
  source: /note="Description of Artificial Sequence: Synthetic peptide"
DTSKLAS

SEQ ID NO: 1483 - protein, 9 aa, Artificial Sequence
  source: /note="Description of Artificial Sequence: Synthetic peptide"
FQGSGYPFT

SEQ ID NO: 1484 - protein, 6 aa, Artificial Sequence
  source: /note="Description of Artificial Sequence: Synthetic peptide"
QLSVGY

SEQ ID NO: 1485 - protein, 3 aa, Artificial Sequence
  source: /note="Description of Artificial Sequence: Synthetic peptide"
DTS

SEQ ID NO: 1486 - protein, 6 aa, Artificial Sequence
  source: /note="Description of Artificial Sequence: Synthetic peptide"
GSGYPF

SEQ ID NO: 1487 - protein, 106 aa, Artificial Sequence; identical to SEQ ID NO: 15
  source: /note="Description of Artificial Sequence: Synthetic polypeptide"

SEQ ID NO: 1488 - protein, 213 aa, Artificial Sequence; identical to SEQ ID NO: 16
  source: /note="Description of Artificial Sequence: Synthetic polypeptide"

SEQ ID NO: 1489 - protein, 7 aa, Artificial Sequence
  source: /note="Description of Artificial Sequence: Synthetic peptide"
TSGMSVG

SEQ ID NO: 1490 - protein, 15 aa, Artificial Sequence
  source: /note="Description of Artificial Sequence: Synthetic peptide"
DIWWDDKKDYNPSLK

SEQ ID NO: 1491 - protein, 10 aa, Artificial Sequence
  source: /note="Description of Artificial Sequence: Synthetic peptide"
SMITNWYFDV

SEQ ID NO: 1492 - protein, 9 aa, Artificial Sequence
  source: /note="Description of Artificial Sequence: Synthetic peptide"
GFSLSTSGM

SEQ ID NO: 1493 - protein, 5 aa, Artificial Sequence
  source: /note="Description of Artificial Sequence: Synthetic peptide"
WWDDK

SEQ ID NO: 1494 - protein, 10 aa, Artificial Sequence
  source: /note="Description of Artificial Sequence: Synthetic peptide"
SMITNWYFDV

SEQ ID NO: 1495 - protein, 120 aa, Artificial Sequence; identical to SEQ ID NO: 55
  source: /note="Description of Artificial Sequence: Synthetic polypeptide"

SEQ ID NO: 1496 - protein, 450 aa, Artificial Sequence; identical to SEQ ID NO: 56
  source: /note="Description of Artificial Sequence: Synthetic polypeptide"

SEQ ID NO: 1497 - protein, 210 aa, Artificial Sequence
  source: /note="Description of Artificial Sequence: Synthetic polypeptide"
KAQLSPLPICPGGAARCQVTLRDLFDRAVVLSHYIHNLSSEMFSEFDKRYTHGRGFITKAINSCHTSSLATPEDKEQAQQMNQKDFLSLIVSILRSWNEPLYHLVTEVRGMQEAPEAILSKAVEIEEQTKRLLEGMELIVSQVHPETKENEIYPVWSGLPSLQMADEESRLSAYYNLLHCLRRDSHKIDNYLKLLKCRIIHNNNCVGYMH

SEQ ID NO: 1498 - protein, 7 aa, Artificial Sequence
  source: /note="Description of Artificial Sequence: Synthetic peptide"
DTSKLAS

SEQ ID NO: 1499 - protein, 9 aa, Artificial Sequence
  source: /note="Description of Artificial Sequence: Synthetic peptide"
FQGSGYPFT

SEQ ID NO: 1500 - protein, 206 aa, Artificial Sequence
  source: /note="Description of Artificial Sequence: Synthetic polypeptide"
QLSPLPICPGGAARCQVTLRDLFDRAVVLSHYIHNLSSEMFSEFDKRYTHGRGFITKAINSCHTSSLATPEDKEQAQQMNQKDFLSLIVSILRSWNEPLYHLVTEVRGMQEAPEAILSKAVEIEEQTKRLLEGMELIVSQVHPETKENEIYPVWSGLPSLQMADEESRLSAYYNLLHCLRRDSHKIDNYLKLLKCRIIHNNNCVGY

SEQ ID NO: 1501 - protein, 3 aa, Artificial Sequence
  source: /note="Description of Artificial Sequence: Synthetic peptide"
DTS

SEQ ID NO: 1502 - protein, 6 aa, Artificial Sequence
  source: /note="Description of Artificial Sequence: Synthetic peptide"
GSGYPF

SEQ ID NO: 1503 - protein, 306 aa, Artificial Sequence
  source: /note="Description of Artificial Sequence: Synthetic polypeptide"
DIQMTQSPSTLSASVGDRVTITCKAQLSPLPICPGGAARCQVTLRDLFDRAVVLSHYIHNLSSEMFSEFDKRYTHGRGFITKAINSCHTSSLATPEDKEQAQQMNQKDFLSLIVSILRSWNEPLYHLVTEVRGMQEAPEAILSKAVEIEEQTKRLLEGMELIVSQVHPETKENEIYPVWSGLPSLQMADEESRLSAYYNLLHCLRRDSHKIDNYLKLLKCRIIHNNNCVGYMHWYQQKPGKAPKLLIYDTSKLASGVPSRFSGSGSGTEFTLTISSLQPDDFATYYCFQGSGYPFTFGGGTKLEIK

SEQ ID NO: 1504 - protein, 413 aa, Artificial Sequence
  source: /note="Description of Artificial Sequence: Synthetic polypeptide"
DIQMTQSPSTLSASVGDRVTITCKAQLSPLPICPGGAARCQVTLRDLFDRAVVLSHYIHNLSSEMFSEFDKRYTHGRGFITKAINSCHTSSLATPEDKEQAQQMNQKDFLSLIVSILRSWNEPLYHLVTEVRGMQEAPEAILSKAVEIEEQTKRLLEGMELIVSQVHPETKENEIYPVWSGLPSLQMADEESRLSAYYNLLHCLRRDSHKIDNYLKLLKCRIIHNNNCVGYMHWYQQKPGKAPKLLIYDTSKLASGVPSRFSGSGSGTEFTLTISSLQPDDFATYYCFQGSGYPFTFGGGTKLEIKRTVAAPSVFIFPPSDEQLKSGTASVVCLLNNFYPREAKVQWKVDNALQSGNSQESVTEQDSKDSTYSLSSTLTLSKADYEKHKVYACEVTHQGLSSPVTKSFNRGEC

SEQ ID NO: 1505 - protein, 7 aa, Artificial Sequence
  source: /note="Description of Artificial Sequence: Synthetic peptide"
TSGMSVG

SEQ ID NO: 1506 - protein, 15 aa, Artificial Sequence
  source: /note="Description of Artificial Sequence: Synthetic peptide"
DIWWDDKKDYNPSLK

SEQ ID NO: 1507 - protein, 10 aa, Artificial Sequence
  source: /note="Description of Artificial Sequence: Synthetic peptide"
SMITNWYFDV

SEQ ID NO: 1508 - protein, 9 aa, Artificial Sequence
  source: /note="Description of Artificial Sequence: Synthetic peptide"
GFSLSTSGM

SEQ ID NO: 1509 - protein, 5 aa, Artificial Sequence
  source: /note="Description of Artificial Sequence: Synthetic peptide"
WWDDK

SEQ ID NO: 1510 - protein, 10 aa, Artificial Sequence
  source: /note="Description of Artificial Sequence: Synthetic peptide"
SMITNWYFDV

SEQ ID NO: 1511 - protein, 120 aa, Artificial Sequence; identical to SEQ ID NO: 55
  source: /note="Description of Artificial Sequence: Synthetic polypeptide"

SEQ ID NO: 1512 - protein, 450 aa, Artificial Sequence; identical to SEQ ID NO: 56
  source: /note="Description of Artificial Sequence: Synthetic polypeptide"

SEQ ID NO: 1513 - protein, 10 aa, Artificial Sequence
  source: /note="Description of Artificial Sequence: Synthetic peptide"
KAQLSVGYMH

SEQ ID NO: 1514 - protein, 207 aa, Artificial Sequence
  source: /note="Description of Artificial Sequence: Synthetic polypeptide"
DTPLPICPGGAARCQVTLRDLFDRAVVLSHYIHNLSSEMFSEFDKRYTHGRGFITKAINSCHTSSLATPEDKEQAQQMNQKDFLSLIVSILRSWNEPLYHLVTEVRGMQEAPEAILSKAVEIEEQTKRLLEGMELIVSQVHPETKENEIYPVWSGLPSLQMADEESRLSAYYNLLHCLRRDSHKIDNYLKLLKCRIIHNNNCSKLAS

SEQ ID NO: 1515 - protein, 9 aa, Artificial Sequence
  source: /note="Description of Artificial Sequence: Synthetic peptide"
FQGSGYPFT

SEQ ID NO: 1516 - protein, 6 aa, Artificial Sequence
  source: /note="Description of Artificial Sequence: Synthetic peptide"
QLSVGY

SEQ ID NO: 1517 - protein, 203 aa, Artificial Sequence
  source: /note="Description of Artificial Sequence: Synthetic polypeptide"
DTPLPICPGGAARCQVTLRDLFDRAVVLSHYIHNLSSEMFSEFDKRYTHGRGFITKAINSCHTSSLATPEDKEQAQQMNQKDFLSLIVSILRSWNEPLYHLVTEVRGMQEAPEAILSKAVEIEEQTKRLLEGMELIVSQVHPETKENEIYPVWSGLPSLQMADEESRLSAYYNLLHCLRRDSHKIDNYLKLLKCRIIHNNNCS

SEQ ID NO: 1518 - protein, 6 aa, Artificial Sequence
  source: /note="Description of Artificial Sequence: Synthetic peptide"
GSGYPF

SEQ ID NO: 1519 - protein, 306 aa, Artificial Sequence
  source: /note="Description of Artificial Sequence: Synthetic polypeptide"
DIQMTQSPSTLSASVGDRVTITCKAQLSVGYMHWYQQKPGKAPKLLIYDTPLPICPGGAARCQVTLRDLFDRAVVLSHYIHNLSSEMFSEFDKRYTHGRGFITKAINSCHTSSLATPEDKEQAQQMNQKDFLSLIVSILRSWNEPLYHLVTEVRGMQEAPEAILSKAVEIEEQTKRLLEGMELIVSQVHPETKENEIYPVWSGLPSLQMADEESRLSAYYNLLHCLRRDSHKIDNYLKLLKCRIIHNNNCSKLASGVPSRFSGSGSGTEFTLTISSLQPDDFATYYCFQGSGYPFTFGGGTKLEIK

SEQ ID NO: 1520 - protein, 413 aa, Artificial Sequence
  source: /note="Description of Artificial Sequence: Synthetic polypeptide"
DIQMTQSPSTLSASVGDRVTITCKAQLSVGYMHWYQQKPGKAPKLLIYDTPLPICPGGAARCQVTLRDLFDRAVVLSHYIHNLSSEMFSEFDKRYTHGRGFITKAINSCHTSSLATPEDKEQAQQMNQKDFLSLIVSILRSWNEPLYHLVTEVRGMQEAPEAILSKAVEIEEQTKRLLEGMELIVSQVHPETKENEIYPVWSGLPSLQMADEESRLSAYYNLLHCLRRDSHKIDNYLKLLKCRIIHNNNCSKLASGVPSRFSGSGSGTEFTLTISSLQPDDFATYYCFQGSGYPFTFGGGTKLEIKRTVAAPSVFIFPPSDEQLKSGTASVVCLLNNFYPREAKVQWKVDNALQSGNSQESVTEQDSKDSTYSLSSTLTLSKADYEKHKVYACEVTHQGLSSPVTKSFNRGEC

SEQ ID NO: 1521 - protein, 7 aa, Artificial Sequence
  source: /note="Description of Artificial Sequence: Synthetic peptide"
TSGMSVG

SEQ ID NO: 1522 - protein, 15 aa, Artificial Sequence
  source: /note="Description of Artificial Sequence: Synthetic peptide"
DIWWDDKKDYNPSLK

SEQ ID NO: 1523 - protein, 10 aa, Artificial Sequence
  source: /note="Description of Artificial Sequence: Synthetic peptide"
SMITNWYFDV

SEQ ID NO: 1524 - protein, 9 aa, Artificial Sequence
  source: /note="Description of Artificial Sequence: Synthetic peptide"
GFSLSTSGM

SEQ ID NO: 1525 - protein, 5 aa, Artificial Sequence
  source: /note="Description of Artificial Sequence: Synthetic peptide"
WWDDK

SEQ ID NO: 1526 - protein, 10 aa, Artificial Sequence
  source: /note="Description of Artificial Sequence: Synthetic peptide"
SMITNWYFDV

SEQ ID NO: 1527 - protein, 120 aa, Artificial Sequence; identical to SEQ ID NO: 55
  source: /note="Description of Artificial Sequence: Synthetic polypeptide"

SEQ ID NO: 1528 - protein, 450 aa, Artificial Sequence; identical to SEQ ID NO: 56
  source: /note="Description of Artificial Sequence: Synthetic polypeptide"

SEQ ID NO: 1529 - protein, 10 aa, Artificial Sequence
  source: /note="Description of Artificial Sequence: Synthetic peptide"
KAQLSVGYMH

SEQ ID NO: 1530 - protein, 7 aa, Artificial Sequence
  source: /note="Description of Artificial Sequence: Synthetic peptide"
DTSKLAS

SEQ ID NO: 1531 - protein, 209 aa, Artificial Sequence
  source: /note="Description of Artificial Sequence: Synthetic polypeptide"
FQGSGPLPICPGGAARCQVTLRDLFDRAVVLSHYIHNLSSEMFSEFDKRYTHGRGFITKAINSCHTSSLATPEDKEQAQQMNQKDFLSLIVSILRSWNEPLYHLVTEVRGMQEAPEAILSKAVEIEEQTKRLLEGMELIVSQVHPETKENEIYPVWSGLPSLQMADEESRLSAYYNLLHCLRRDSHKIDNYLKLLKCRIIHNNNCYPFT

SEQ ID NO: 1532 - protein, 6 aa, Artificial Sequence
  source: /note="Description of Artificial Sequence: Synthetic peptide"
QLSVGY

SEQ ID NO: 1533 - protein, 3 aa, Artificial Sequence
  source: /note="Description of Artificial Sequence: Synthetic peptide"
DTS

SEQ ID NO: 1534 - protein, 206 aa, Artificial Sequence
  source: /note="Description of Artificial Sequence: Synthetic polypeptide"
GSGPLPICPGGAARCQVTLRDLFDRAVVLSHYIHNLSSEMFSEFDKRYTHGRGFITKAINSCHTSSLATPEDKEQAQQMNQKDFLSLIVSILRSWNEPLYHLVTEVRGMQEAPEAILSKAVEIEEQTKRLLEGMELIVSQVHPETKENEIYPVWSGLPSLQMADEESRLSAYYNLLHCLRRDSHKIDNYLKLLKCRIIHNNNCYPF

SEQ ID NO: 1535 - protein, 306 aa, Artificial Sequence
  source: /note="Description of Artificial Sequence: Synthetic polypeptide"
DIQMTQSPSTLSASVGDRVTITCKAQLSVGYMHWYQQKPGKAPKLLIYDTSKLASGVPSRFSGSGSGTEFTLTISSLQPDDFATYYCFQGSGPLPICPGGAARCQVTLRDLFDRAVVLSHYIHNLSSEMFSEFDKRYTHGRGFITKAINSCHTSSLATPEDKEQAQQMNQKDFLSLIVSILRSWNEPLYHLVTEVRGMQEAPEAILSKAVEIEEQTKRLLEGMELIVSQVHPETKENEIYPVWSGLPSLQMADEESRLSAYYNLLHCLRRDSHKIDNYLKLLKCRIIHNNNCYPFTFGGGTKLEIK

SEQ ID NO: 1536 - protein, 413 aa, Artificial Sequence
  source: /note="Description of Artificial Sequence: Synthetic polypeptide"
DIQMTQSPSTLSASVGDRVTITCKAQLSVGYMHWYQQKPGKAPKLLIYDTSKLASGVPSRFSGSGSGTEFTLTISSLQPDDFATYYCFQGSGPLPICPGGAARCQVTLRDLFDRAVVLSHYIHNLSSEMFSEFDKRYTHGRGFITKAINSCHTSSLATPEDKEQAQQMNQKDFLSLIVSILRSWNEPLYHLVTEVRGMQEAPEAILSKAVEIEEQTKRLLEGMELIVSQVHPETKENEIYPVWSGLPSLQMADEESRLSAYYNLLHCLRRDSHKIDNYLKLLKCRIIHNNNCYPFTFGGGTKLEIKRTVAAPSVFIFPPSDEQLKSGTASVVCLLNNFYPREAKVQWKVDNALQSGNSQESVTEQDSKDSTYSLSSTLTLSKADYEKHKVYACEVTHQGLSSPVTKSFNRGEC

SEQ ID NO: 1537 - protein, 205 aa, Artificial Sequence
  source: /note="Description of Artificial Sequence: Synthetic polypeptide"
NRTGDPGPGPSIQKTYDLTRYLEHQLRSLAGTYLNYLGPPFNEPDFNPPRLGAETLPRATVDLEVWRSLNDKLRLTQNYEAYSHLLCYLRGLNRQAATAELRRSLAHFCTSLQGLLGSIAGVMAALGYPLPQPLPGTEPTWTPGPAHSDFLQKMDDFWLLKELQTWLWRSAKDFNRLKKKMQPPAAAVTLHLGAHGFSTSGMSVG

SEQ ID NO: 1538 - protein, 16 aa, Artificial Sequence
  source: /note="Description of Artificial Sequence: Synthetic peptide"
DIWWDDKKDYNPSLKS

SEQ ID NO: 1539 - protein, 10 aa, Artificial Sequence
  source: /note="Description of Artificial Sequence: Synthetic peptide"
SMITNWYFDV

SEQ ID NO: 1540 - protein, 207 aa, Artificial Sequence
  source: /note="Description of Artificial Sequence: Synthetic polypeptide"
GFSLLNRTGDPGPGPSIQKTYDLTRYLEHQLRSLAGTYLNYLGPPFNEPDFNPPRLGAETLPRATVDLEVWRSLNDKLRLTQNYEAYSHLLCYLRGLNRQAATAELRRSLAHFCTSLQGLLGSIAGVMAALGYPLPQPLPGTEPTWTPGPAHSDFLQKMDDFWLLKELQTWLWRSAKDFNRLKKKMQPPAAAVTLHLGAHGFSTSGM

SEQ ID NO: 1541 - protein, 5 aa, Artificial Sequence
  source: /note="Description of Artificial Sequence: Synthetic peptide"
WWDDK

SEQ ID NO: 1542 - protein, 10 aa, Artificial Sequence
  source: /note="Description of Artificial Sequence: Synthetic peptide"
SMITNWYFDV

SEQ ID NO: 1543 - protein, 318 aa, Artificial Sequence
  source: /note="Description of Artificial Sequence: Synthetic polypeptide"
QVTLRESGPALVKPTQTLTLTCTFSGFSLLNRTGDPGPGPSIQKTYDLTRYLEHQLRSLAGTYLNYLGPPFNEPDFNPPRLGAETLPRATVDLEVWRSLNDKLRLTQNYEAYSHLLCYLRGLNRQAATAELRRSLAHFCTSLQGLLGSIAGVMAALGYPLPQPLPGTEPTWTPGPAHSDFLQKMDDFWLLKELQTWLWRSAKDFNRLKKKMQPPAAAVTLHLGAHGFSTSGMSVGWIRQPPGKALEWLADIWWDDKKDYNPSLKSRLTISKDTSKNQVVLKVTNMDPADTATYYCARSMITNWYFDVWGAGTTVTVSS

SEQ ID NO: 1544 - protein, 648 aa, Artificial Sequence
  source: /note="Description of Artificial Sequence: Synthetic polypeptide"
QVTLRESGPALVKPTQTLTLTCTFSGFSLLNRTGDPGPGPSIQKTYDLTRYLEHQLRSLAGTYLNYLGPPFNEPDFNPPRLGAETLPRATVDLEVWRSLNDKLRLTQNYEAYSHLLCYLRGLNRQAATAELRRSLAHFCTSLQGLLGSIAGVMAALGYPLPQPLPGTEPTWTPGPAHSDFLQKMDDFWLLKELQTWLWRSAKDFNRLKKKMQPPAAAVTLHLGAHGFSTSGMSVGWIRQPPGKALEWLADIWWDDKKDYNPSLKSRLTISKDTSKNQVVLKVTNMDPADTATYYCARSMITNWYFDVWGAGTTVTVSSASTKGPSVFPLAPSSKSTSGGTAALGCLVKDYFPEPVTVSWNSGALTSGVHTFPAVLQSSGLYSLSSVVTVPSSSLGTQTYICNVNHKPSNTKVDKRVEPKSCDKTHTCPPCPAPELLGGPSVFLFPPKPKDTLMISRTPEVTCVVVAVSHEDPEVKFNWYVDGVEVHNAKTKPREEQYNSTYRVVSVLTVLHQDWLNGKEYKCKVSNKALAAPIEKTISKAKGQPREPQVYTLPPSREEMTKNQVSLTCLVKGFYPSDIAVEWESNGQPENNYKTTPPVLDSDGSFFLYSKLTVDKSRWQQGNVFSCSVMHEALHNHYTQKSLSLSPGK

SEQ ID NO: 1545 - protein, 10 aa, Artificial Sequence
  source: /note="Description of Artificial Sequence: Synthetic peptide"
KAQLSVGYMH

SEQ ID NO: 1546 - protein, 7 aa, Artificial Sequence
  source: /note="Description of Artificial Sequence: Synthetic peptide"
DTSKLAS

SEQ ID NO: 1547 - protein, 9 aa, Artificial Sequence
  source: /note="Description of Artificial Sequence: Synthetic peptide"
FQGSGYPFT

SEQ ID NO: 1548 - protein, 6 aa, Artificial Sequence
  source: /note="Description of Artificial Sequence: Synthetic peptide"
QLSVGY

SEQ ID NO: 1549 - protein, 3 aa, Artificial Sequence
  source: /note="Description of Artificial Sequence: Synthetic peptide"
DTS

SEQ ID NO: 1550 - protein, 6 aa, Artificial Sequence
  source: /note="Description of Artificial Sequence: Synthetic peptide"
GSGYPF

SEQ ID NO: 1551 - protein, 106 aa, Artificial Sequence; identical to SEQ ID NO: 15
  source: /note="Description of Artificial Sequence: Synthetic polypeptide"

SEQ ID NO: 1552 - protein, 213 aa, Artificial Sequence; identical to SEQ ID NO: 16
  source: /note="Description of Artificial Sequence: Synthetic polypeptide"

SEQ ID NO: 1553 - protein, 7 aa, Artificial Sequence
  source: /note="Description of Artificial Sequence: Synthetic peptide"
TSGMSVG

SEQ ID NO: 1554 - protein, 214 aa, Artificial Sequence
  source: /note="Description of Artificial Sequence: Synthetic polypeptide"
DIWWDLNRTGDPGPGPSIQKTYDLTRYLEHQLRSLAGTYLNYLGPPFNEPDFNPPRLGAETLPRATVDLEVWRSLNDKLRLTQNYEAYSHLLCYLRGLNRQAATAELRRSLAHFCTSLQGLLGSIAGVMAALGYPLPQPLPGTEPTWTPGPAHSDFLQKMDDFWLLKELQTWLWRSAKDFNRLKKKMQPPAAAVTLHLGAHGFDKKDYNPSLKS

SEQ ID NO: 1555 - protein, 10 aa, Artificial Sequence
  source: /note="Description of Artificial Sequence: Synthetic peptide"
SMITNWYFDV

SEQ ID NO: 1556 - protein, 9 aa, Artificial Sequence
  source: /note="Description of Artificial Sequence: Synthetic peptide"
GFSLSTSGM

SEQ ID NO: 1557 - protein, 203 aa, Artificial Sequence
  source: /note="Description of Artificial Sequence: Synthetic polypeptide"
WWDLNRTGDPGPGPSIQKTYDLTRYLEHQLRSLAGTYLNYLGPPFNEPDFNPPRLGAETLPRATVDLEVWRSLNDKLRLTQNYEAYSHLLCYLRGLNRQAATAELRRSLAHFCTSLQGLLGSIAGVMAALGYPLPQPLPGTEPTWTPGPAHSDFLQKMDDFWLLKELQTWLWRSAKDFNRLKKKMQPPAAAVTLHLGAHGFDK

SEQ ID NO: 1558 - protein, 10 aa, Artificial Sequence
  source: /note="Description of Artificial Sequence: Synthetic peptide"
SMITNWYFDV

SEQ ID NO: 1559 - protein, 318 aa, Artificial Sequence
  source: /note="Description of Artificial Sequence: Synthetic polypeptide"
QVTLRESGPALVKPTQTLTLTCTFSGFSLSTSGMSVGWIRQPPGKALEWLADIWWDLNRTGDPGPGPSIQKTYDLTRYLEHQLRSLAGTYLNYLGPPFNEPDFNPPRLGAETLPRATVDLEVWRSLNDKLRLTQNYEAYSHLLCYLRGLNRQAATAELRRSLAHFCTSLQGLLGSIAGVMAALGYPLPQPLPGTEPTWTPGPAHSDFLQKMDDFWLLKELQTWLWRSAKDFNRLKKKMQPPAAAVTLHLGAHGFDKKDYNPSLKSRLTISKDTSKNQVVLKVTNMDPADTATYYCARSMITNWYFDVWGAGTTVTVSS

SEQ ID NO: 1560 - protein, 648 aa, Artificial Sequence
  source: /note="Description of Artificial Sequence: Synthetic polypeptide"
QVTLRESGPALVKPTQTLTLTCTFSGFSLSTSGMSVGWIRQPPGKALEWLADIWWDLNRTGDPGPGPSIQKTYDLTRYLEHQLRSLAGTYLNYLGPPFNEPDFNPPRLGAETLPRATVDLEVWRSLNDKLRLTQNYEAYSHLLCYLRGLNRQAATAELRRSLAHFCTSLQGLLGSIAGVMAALGYPLPQPLPGTEPTWTPGPAHSDFLQKMDDFWLLKELQTWLWRSAKDFNRLKKKMQPPAAAVTLHLGAHGFDKKDYNPSLKSRLTISKDTSKNQVVLKVTNMDPADTATYYCARSMITNWYFDVWGAGTTVTVSSASTKGPSVFPLAPSSKSTSGGTAALGCLVKDYFPEPVTVSWNSGALTSGVHTFPAVLQSSGLYSLSSVVTVPSSSLGTQTYICNVNHKPSNTKVDKRVEPKSCDKTHTCPPCPAPELLGGPSVFLFPPKPKDTLMISRTPEVTCVVVAVSHEDPEVKFNWYVDGVEVHNAKTKPREEQYNSTYRVVSVLTVLHQDWLNGKEYKCKVSNKALAAPIEKTISKAKGQPREPQVYTLPPSREEMTKNQVSLTCLVKGFYPSDIAVEWESNGQPENNYKTTPPVLDSDGSFFLYSKLTVDKSRWQQGNVFSCSVMHEALHNHYTQKSLSLSPGK

SEQ ID NO: 1561 - protein, 10 aa, Artificial Sequence
  source: /note="Description of Artificial Sequence: Synthetic peptide"
KAQLSVGYMH

SEQ ID NO: 1562 - protein, 7 aa, Artificial Sequence
  source: /note="Description of Artificial Sequence: Synthetic peptide"
DTSKLAS

SEQ ID NO: 1563 - protein, 9 aa, Artificial Sequence
  source: /note="Description of Artificial Sequence: Synthetic peptide"
FQGSGYPFT

SEQ ID NO: 1564 - protein, 6 aa, Artificial Sequence
  source: /note="Description of Artificial Sequence: Synthetic peptide"
QLSVGY

SEQ ID NO: 1565 - protein, 3 aa, Artificial Sequence
  source: /note="Description of Artificial Sequence: Synthetic peptide"
DTS

SEQ ID NO: 1566 - protein, 6 aa, Artificial Sequence
  source: /note="Description of Artificial Sequence: Synthetic peptide"
GSGYPF

SEQ ID NO: 1567 - protein, 106 aa, Artificial Sequence; identical to SEQ ID NO: 15
  source: /note="Description of Artificial Sequence: Synthetic polypeptide"

SEQ ID NO: 1568 - protein, 213 aa, Artificial Sequence; identical to SEQ ID NO: 16
  source: /note="Description of Artificial Sequence: Synthetic polypeptide"

SEQ ID NO: 1569 - protein, 7 aa, Artificial Sequence
  source: /note="Description of Artificial Sequence: Synthetic peptide"
TSGMSVG

SEQ ID NO: 1570 - protein, 16 aa, Artificial Sequence
  source: /note="Description of Artificial Sequence: Synthetic peptide"
DIWWDDKKDYNPSLKS

SEQ ID NO: 1571 - protein, 208 aa, Artificial Sequence
  source: /note="Description of Artificial Sequence: Synthetic polypeptide"
SMITLNRTGDPGPGPSIQKTYDLTRYLEHQLRSLAGTYLNYLGPPFNEPDFNPPRLGAETLPRATVDLEVWRSLNDKLRLTQNYEAYSHLLCYLRGLNRQAATAELRRSLAHFCTSLQGLLGSIAGVMAALGYPLPQPLPGTEPTWTPGPAHSDFLQKMDDFWLLKELQTWLWRSAKDFNRLKKKMQPPAAAVTLHLGAHGFNWYFDV

SEQ ID NO: 1572 - protein, 9 aa, Artificial Sequence
  source: /note="Description of Artificial Sequence: Synthetic peptide"
GFSLSTSGM

SEQ ID NO: 1573 - protein, 5 aa, Artificial Sequence
  source: /note="Description of Artificial Sequence: Synthetic peptide"
WWDDK

SEQ ID NO: 1574 - protein, 208 aa, Artificial Sequence; identical to SEQ ID NO: 1571
  source: /note="Description of Artificial Sequence: Synthetic polypeptide"

SEQ ID NO: 1575 - protein, 318 aa, Artificial Sequence
  source: /note="Description of Artificial Sequence: Synthetic polypeptide"
QVTLRESGPALVKPTQTLTLTCTFSGFSLSTSGMSVGWIRQPPGKALEWLADIWWDDKKDYNPSLKSRLTISKDTSKNQVVLKVTNMDPADTATYYCARSMITLNRTGDPGPGPSIQKTYDLTRYLEHQLRSLAGTYLNYLGPPFNEPDFNPPRLGAETLPRATVDLEVWRSLNDKLRLTQNYEAYSHLLCYLRGLNRQAATAELRRSLAHFCTSLQGLLGSIAGVMAALGYPLPQPLPGTEPTWTPGPAHSDFLQKMDDFWLLKELQTWLWRSAKDFNRLKKKMQPPAAAVTLHLGAHGFNWYFDVWGAGTTVTVSS

SEQ ID NO: 1576 - protein, 648 aa, Artificial Sequence
  source: /note="Description of Artificial Sequence: Synthetic polypeptide"
QVTLRESGPALVKPTQTLTLTCTFSGFSLSTSGMSVGWIRQPPGKALEWLADIWWDDKKDYNPSLKSRLTISKDTSKNQVVLKVTNMDPADTATYYCARSMITLNRTGDPGPGPSIQKTYDLTRYLEHQLRSLAGTYLNYLGPPFNEPDFNPPRLGAETLPRATVDLEVWRSLNDKLRLTQNYEAYSHLLCYLRGLNRQAATAELRRSLAHFCTSLQGLLGSIAGVMAALGYPLPQPLPGTEPTWTPGPAHSDFLQKMDDFWLLKELQTWLWRSAKDFNRLKKKMQPPAAAVTLHLGAHGFNWYFDVWGAGTTVTVSSASTKGPSVFPLAPSSKSTSGGTAALGCLVKDYFPEPVTVSWNSGALTSGVHTFPAVLQSSGLYSLSSVVTVPSSSLGTQTYICNVNHKPSNTKVDKRVEPKSCDKTHTCPPCPAPELLGGPSVFLFPPKPKDTLMISRTPEVTCVVVAVSHEDPEVKFNWYVDGVEVHNAKTKPREEQYNSTYRVVSVLTVLHQDWLNGKEYKCKVSNKALAAPIEKTISKAKGQPREPQVYTLPPSREEMTKNQVSLTCLVKGFYPSDIAVEWESNGQPENNYKTTPPVLDSDGSFFLYSKLTVDKSRWQQGNVFSCSVMHEALHNHYTQKSLSLSPGK

SEQ ID NO: 1577 - protein, 10 aa, Artificial Sequence
  source: /note="Description of Artificial Sequence: Synthetic peptide"
KAQLSVGYMH

SEQ ID NO: 1578 - protein, 7 aa, Artificial Sequence
  source: /note="Description of Artificial Sequence: Synthetic peptide"
DTSKLAS

SEQ ID NO: 1579 - protein, 9 aa, Artificial Sequence
  source: /note="Description of Artificial Sequence: Synthetic peptide"
FQGSGYPFT

SEQ ID NO: 1580 - protein, 6 aa, Artificial Sequence
  source: /note="Description of Artificial Sequence: Synthetic peptide"
QLSVGY

SEQ ID NO: 1581 - protein, 3 aa, Artificial Sequence
  source: /note="Description of Artificial Sequence: Synthetic peptide"
DTS

SEQ ID NO: 1582 - protein, 6 aa, Artificial Sequence
  source: /note="Description of Artificial Sequence: Synthetic peptide"
GSGYPF

SEQ ID NO: 1583 - protein, 106 aa, Artificial Sequence; identical to SEQ ID NO: 15
  source: /note="Description of Artificial Sequence: Synthetic polypeptide"

SEQ ID NO: 1584 - protein, 213 aa, Artificial Sequence; identical to SEQ ID NO: 16
  source: /note="Description of Artificial Sequence: Synthetic polypeptide"

SEQ ID NO: 1585 - protein, 7 aa, Artificial Sequence
  source: /note="Description of Artificial Sequence: Synthetic peptide"
TSGMSVG

SEQ ID NO: 1586 - protein, 15 aa, Artificial Sequence
  source: /note="Description of Artificial Sequence: Synthetic peptide"
DIWWDDKKDYNPSLK

SEQ ID NO: 1587 - protein, 10 aa, Artificial Sequence
  source: /note="Description of Artificial Sequence: Synthetic peptide"
SMITNWYFDV

SEQ ID NO: 1588 - protein, 9 aa, Artificial Sequence
  source: /note="Description of Artificial Sequence: Synthetic peptide"
GFSLSTSGM

SEQ ID NO: 1589 - protein, 5 aa, Artificial Sequence
  source: /note="Description of Artificial Sequence: Synthetic peptide"
WWDDK

SEQ ID NO: 1590 - protein, 10 aa, Artificial Sequence
  source: /note="Description of Artificial Sequence: Synthetic peptide"
SMITNWYFDV

SEQ ID NO: 1591 - protein, 120 aa, Artificial Sequence; identical to SEQ ID NO: 55
  source: /note="Description of Artificial Sequence: Synthetic polypeptide"

SEQ ID NO: 1592 - protein, 450 aa, Artificial Sequence; identical to SEQ ID NO: 56
  source: /note="Description of Artificial Sequence: Synthetic polypeptide"

SEQ ID NO: 1593 - protein, 208 aa, Artificial Sequence
  source: /note="Description of Artificial Sequence: Synthetic polypeptide"
KAQLSLNRTGDPGPGPSIQKTYDLTRYLEHQLRSLAGTYLNYLGPPFNEPDFNPPRLGAETLPRATVDLEVWRSLNDKLRLTQNYEAYSHLLCYLRGLNRQAATAELRRSLAHFCTSLQGLLGSIAGVMAALGYPLPQPLPGTEPTWTPGPAHSDFLQKMDDFWLLKELQTWLWRSAKDFNRLKKKMQPPAAAVTLHLGAHGFVGYMH

SEQ ID NO: 1594 - protein, 7 aa, Artificial Sequence
  source: /note="Description of Artificial Sequence: Synthetic peptide"
DTSKLAS

SEQ ID NO: 1595 - protein, 9 aa, Artificial Sequence
  source: /note="Description of Artificial Sequence: Synthetic peptide"
FQGSGYPFT

SEQ ID NO: 1596 - protein, 204 aa, Artificial Sequence
  source: /note="Description of Artificial Sequence: Synthetic polypeptide"
QLSLNRTGDPGPGPSIQKTYDLTRYLEHQLRSLAGTYLNYLGPPFNEPDFNPPRLGAETLPRATVDLEVWRSLNDKLRLTQNYEAYSHLLCYLRGLNRQAATAELRRSLAHFCTSLQGLLGSIAGVMAALGYPLPQPLPGTEPTWTPGPAHSDFLQKMDDFWLLKELQTWLWRSAKDFNRLKKKMQPPAAAVTLHLGAHGFVGY

SEQ ID NO: 1597 - protein, 3 aa, Artificial Sequence
  source: /note="Description of Artificial Sequence: Synthetic peptide"
DTS

SEQ ID NO: 1598 - protein, 6 aa, Artificial Sequence
  source: /note="Description of Artificial Sequence: Synthetic peptide"
GSGYPF

SEQ ID NO: 1599 - protein, 304 aa, Artificial Sequence
  source: /note="Description of Artificial Sequence: Synthetic polypeptide"
DIQMTQSPSTLSASVGDRVTITCKAQLSLNRTGDPGPGPSIQKTYDLTRYLEHQLRSLAGTYLNYLGPPFNEPDFNPPRLGAETLPRATVDLEVWRSLNDKLRLTQNYEAYSHLLCYLRGLNRQAATAELRRSLAHFCTSLQGLLGSIAGVMAALGYPLPQPLPGTEPTWTPGPAHSDFLQKMDDFWLLKELQTWLWRSAKDFNRLKKKMQPPAAAVTLHLGAHGFVGYMHWYQQKPGKAPKLLIYDTSKLASGVPSRFSGSGSGTEFTLTISSLQPDDFATYYCFQGSGYPFTFGGGTKLEIK

SEQ ID NO: 1600 - protein, 411 aa, Artificial Sequence
  source: /note="Description of Artificial Sequence: Synthetic polypeptide"
DIQMTQSPSTLSASVGDRVTITCKAQLSLNRTGDPGPGPSIQKTYDLTRYLEHQLRSLAGTYLNYLGPPFNEPDFNPPRLGAETLPRATVDLEVWRSLNDKLRLTQNYEAYSHLLCYLRGLNRQAATAELRRSLAHFCTSLQGLLGSIAGVMAALGYPLPQPLPGTEPTWTPGPAHSDFLQKMDDFWLLKELQTWLWRSAKDFNRLKKKMQPPAAAVTLHLGAHGFVGYMHWYQQKPGKAPKLLIYDTSKLASGVPSRFSGSGSGTEFTLTISSLQPDDFATYYCFQGSGYPFTFGGGTKLEIKRTVAAPSVFIFPPSDEQLKSGTASVVCLLNNFYPREAKVQWKVDNALQSGNSQESVTEQDSKDSTYSLSSTLTLSKADYEKHKVYACEVTHQGLSSPVTKSFNRGEC

SEQ ID NO: 1601 - protein, 7 aa, Artificial Sequence
  source: /note="Description of Artificial Sequence: Synthetic peptide"
TSGMSVG

SEQ ID NO: 1602 - protein, 15 aa, Artificial Sequence
  source: /note="Description of Artificial Sequence: Synthetic peptide"
DIWWDDKKDYNPSLK

SEQ ID NO: 1603 - protein, 10 aa, Artificial Sequence
  source: /note="Description of Artificial Sequence: Synthetic peptide"
SMITNWYFDV

SEQ ID NO: 1604 - protein, 9 aa, Artificial Sequence
  source: /note="Description of Artificial Sequence: Synthetic peptide"
GFSLSTSGM

SEQ ID NO: 1605 - protein, 5 aa, Artificial Sequence
  source: /note="Description of Artificial Sequence: Synthetic peptide"
WWDDK

SEQ ID NO: 1606 - protein, 10 aa, Artificial Sequence
  source: /note="Description of Artificial Sequence: Synthetic peptide"
SMITNWYFDV

SEQ ID NO: 1607 - protein, 120 aa, Artificial Sequence; identical to SEQ ID NO: 55
  source: /note="Description of Artificial Sequence: Synthetic polypeptide"

SEQ ID NO: 1608 - protein, 450 aa, Artificial Sequence; identical to SEQ ID NO: 56
  source: /note="Description of Artificial Sequence: Synthetic polypeptide"

SEQ ID NO: 1609 - protein, 10 aa, Artificial Sequence
  source: /note="Description of Artificial Sequence: Synthetic peptide"
KAQLSVGYMH

SEQ ID NO: 1610 - protein, 205 aa, Artificial Sequence
  source: /note="Description of Artificial Sequence: Synthetic polypeptide"
DTLNRTGDPGPGPSIQKTYDLTRYLEHQLRSLAGTYLNYLGPPFNEPDFNPPRLGAETLPRATVDLEVWRSLNDKLRLTQNYEAYSHLLCYLRGLNRQAATAELRRSLAHFCTSLQGLLGSIAGVMAALGYPLPQPLPGTEPTWTPGPAHSDFLQKMDDFWLLKELQTWLWRSAKDFNRLKKKMQPPAAAVTLHLGAHGFSKLAS

SEQ ID NO: 1611 - protein, 9 aa, Artificial Sequence
  source: /note="Description of Artificial Sequence: Synthetic peptide"
FQGSGYPFT

SEQ ID NO: 1612 - protein, 6 aa, Artificial Sequence
  source: /note="Description of Artificial Sequence: Synthetic peptide"
QLSVGY

SEQ ID NO: 1613 - protein, 201 aa, Artificial Sequence
  source: /note="Description of Artificial Sequence: Synthetic polypeptide"
DTLNRTGDPGPGPSIQKTYDLTRYLEHQLRSLAGTYLNYLGPPFNEPDFNPPRLGAETLPRATVDLEVWRSLNDKLRLTQNYEAYSHLLCYLRGLNRQAATAELRRSLAHFCTSLQGLLGSIAGVMAALGYPLPQPLPGTEPTWTPGPAHSDFLQKMDDFWLLKELQTWLWRSAKDFNRLKKKMQPPAAAVTLHLGAHGFS

SEQ ID NO: 1614 - protein, 6 aa, Artificial Sequence
  source: /note="Description of Artificial Sequence: Synthetic peptide"
GSGYPF

SEQ ID NO: 1615 - protein, 304 aa, Artificial Sequence
  source: /note="Description of Artificial Sequence: Synthetic polypeptide"
DIQMTQSPSTLSASVGDRVTITCKAQLSVGYMHWYQQKPGKAPKLLIYDTLNRTGDPGPGPSIQKTYDLTRYLEHQLRSLAGTYLNYLGPPFNEPDFNPPRLGAETLPRATVDLEVWRSLNDKLRLTQNYEAYSHLLCYLRGLNRQAATAELRRSLAHFCTSLQGLLGSIAGVMAALGYPLPQPLPGTEPTWTPGPAHSDFLQKMDDFWLLKELQTWLWRSAKDFNRLKKKMQPPAAAVTLHLGAHGFSKLASGVPSRFSGSGSGTEFTLTISSLQPDDFATYYCFQGSGYPFTFGGGTKLEIK

SEQ ID NO: 1616 - protein, 411 aa, Artificial Sequence
  source: /note="Description of Artificial Sequence: Synthetic polypeptide"
DIQMTQSPSTLSASVGDRVTITCKAQLSVGYMHWYQQKPGKAPKLLIYDTLNRTGDPGPGPSIQKTYDLTRYLEHQLRSLAGTYLNYLGPPFNEPDFNPPRLGAETLPRATVDLEVWRSLNDKLRLTQNYEAYSHLLCYLRGLNRQAATAELRRSLAHFCTSLQGLLGSIAGVMAALGYPLPQPLPGTEPTWTPGPAHSDFLQKMDDFWLLKELQTWLWRSAKDFNRLKKKMQPPAAAVTLHLGAHGFSKLASGVPSRFSGSGSGTEFTLTISSLQPDDFATYYCFQGSGYPFTFGGGTKLEIKRTVAAPSVFIFPPSDEQLKSGTASVVCLLNNFYPREAKVQWKVDNALQSGNSQESVTEQDSKDSTYSLSSTLTLSKADYEKHKVYACEVTHQGLSSPVTKSFNRGEC

SEQ ID NO: 1617 - protein, 7 aa, Artificial Sequence
  source: /note="Description of Artificial Sequence: Synthetic peptide"
TSGMSVG

SEQ ID NO: 1618 - protein, 15 aa, Artificial Sequence
  source: /note="Description of Artificial Sequence: Synthetic peptide"
DIWWDDKKDYNPSLK

SEQ ID NO: 1619 - protein, 10 aa, Artificial Sequence
  source: /note="Description of Artificial Sequence: Synthetic peptide"
SMITNWYFDV

SEQ ID NO: 1620 - protein, 9 aa, Artificial Sequence
  source: /note="Description of Artificial Sequence: Synthetic peptide"
GFSLSTSGM

SEQ ID NO: 1621 - protein, 5 aa, Artificial Sequence
  source: /note="Description of Artificial Sequence: Synthetic peptide"
WWDDK

SEQ ID NO: 1622 - protein, 10 aa, Artificial Sequence
  source: /note="Description of Artificial Sequence: Synthetic peptide"
SMITNWYFDV

SEQ ID NO: 1623 - protein, 120 aa, Artificial Sequence; identical to SEQ ID NO: 55
  source: /note="Description of Artificial Sequence: Synthetic polypeptide"

SEQ ID NO: 1624 - protein, 450 aa, Artificial Sequence; identical to SEQ ID NO: 56
  source: /note="Description of Artificial Sequence: Synthetic polypeptide"

SEQ ID NO: 1625 - protein, 10 aa, Artificial Sequence
  source: /note="Description of Artificial Sequence: Synthetic peptide"
KAQLSVGYMH

SEQ ID NO: 1626 - protein, 7 aa, Artificial Sequence
  source: /note="Description of Artificial Sequence: Synthetic peptide"
DTSKLAS

SEQ ID NO: 1627 - protein, 207 aa, Artificial Sequence
  source: /note="Description of Artificial Sequence: Synthetic polypeptide"
FQGSGLNRTGDPGPGPSIQKTYDLTRYLEHQLRSLAGTYLNYLGPPFNEPDFNPPRLGAETLPRATVDLEVWRSLNDKLRLTQNYEAYSHLLCYLRGLNRQAATAELRRSLAHFCTSLQGLLGSIAGVMAALGYPLPQPLPGTEPTWTPGPAHSDFLQKMDDFWLLKELQTWLWRSAKDFNRLKKKMQPPAAAVTLHLGAHGFYPFT

SEQ ID NO: 1628 - protein, 6 aa, Artificial Sequence
  source: /note="Description of Artificial Sequence: Synthetic peptide"
QLSVGY

SEQ ID NO: 1629 - protein, 3 aa, Artificial Sequence
  source: /note="Description of Artificial Sequence: Synthetic peptide"
DTS

SEQ ID NO: 1630 - protein, 204 aa, Artificial Sequence
  source: /note="Description of Artificial Sequence: Synthetic polypeptide"
GSGLNRTGDPGPGPSIQKTYDLTRYLEHQLRSLAGTYLNYLGPPFNEPDFNPPRLGAETLPRATVDLEVWRSLNDKLRLTQNYEAYSHLLCYLRGLNRQAATAELRRSLAHFCTSLQGLLGSIAGVMAALGYPLPQPLPGTEPTWTPGPAHSDFLQKMDDFWLLKELQTWLWRSAKDFNRLKKKMQPPAAAVTLHLGAHGFYPF

SEQ ID NO: 1631 - protein, 304 aa, Artificial Sequence
  source: /note="Description of Artificial Sequence: Synthetic polypeptide"
DIQMTQSPSTLSASVGDRVTITCKAQLSVGYMHWYQQKPGKAPKLLIYDTSKLASGVPSRFSGSGSGTEFTLTISSLQPDDFATYYCFQGSGLNRTGDPGPGPSIQKTYDLTRYLEHQLRSLAGTYLNYLGPPFNEPDFNPPRLGAETLPRATVDLEVWRSLNDKLRLTQNYEAYSHLLCYLRGLNRQAATAELRRSLAHFCTSLQGLLGSIAGVMAALGYPLPQPLPGTEPTWTPGPAHSDFLQKMDDFWLLKELQTWLWRSAKDFNRLKKKMQPPAAAVTLHLGAHGFYPFTFGGGTKLEIK

SEQ ID NO: 1632 - protein, 411 aa, Artificial Sequence
  source: /note="Description of Artificial Sequence: Synthetic polypeptide"
DIQMTQSPSTLSASVGDRVTITCKAQLSVGYMHWYQQKPGKAPKLLIYDTSKLASGVPSRFSGSGSGTEFTLTISSLQPDDFATYYCFQGSGLNRTGDPGPGPSIQKTYDLTRYLEHQLRSLAGTYLNYLGPPFNEPDFNPPRLGAETLPRATVDLEVWRSLNDKLRLTQNYEAYSHLLCYLRGLNRQAATAELRRSLAHFCTSLQGLLGSIAGVMAALGYPLPQPLPGTEPTWTPGPAHSDFLQKMDDFWLLKELQTWLWRSAKDFNRLKKKMQPPAAAVTLHLGAHGFYPFTFGGGTKLEIKRTVAAPSVFIFPPSDEQLKSGTASVVCLLNNFYPREAKVQWKVDNALQSGNSQESVTEQDSKDSTYSLSSTLTLSKADYEKHKVYACEVTHQGLSSPVTKSFNRGEC

SEQ ID NO: 1633 - protein, 153 aa, Artificial Sequence
  source: /note="Description of Artificial Sequence: Synthetic polypeptide"
PIQKVQDDTKTLIKTIVTRINDISHTQSVSSKQKVTGLDFIPGLHPILTLSKMDQTLAVYQQILTSMPSRNVIQISNDLENLRDLLHVLAFSKSCHLPWASGLETLDSLGGVLEASGYSTEVVALSRLQGSLQDMLWQLDLSPGCSTSGMSVG

SEQ ID NO: 1634 - protein, 16 aa, Artificial Sequence
  source: /note="Description of Artificial Sequence: Synthetic peptide"
DIWWDDKKDYNPSLKS

SEQ ID NO: 1635 - protein, 10 aa, Artificial Sequence
  source: /note="Description of Artificial Sequence: Synthetic peptide"
SMITNWYFDV

SEQ ID NO: 1636 - protein, 155 aa, Artificial Sequence
  source: /note="Description of Artificial Sequence: Synthetic polypeptide"
GFSLVPIQKVQDDTKTLIKTIVTRINDISHTQSVSSKQKVTGLDFIPGLHPILTLSKMDQTLAVYQQILTSMPSRNVIQISNDLENLRDLLHVLAFSKSCHLPWASGLETLDSLGGVLEASGYSTEVVALSRLQGSLQDMLWQLDLSPGCSTSGM

SEQ ID NO: 1637 - protein, 5 aa, Artificial Sequence
  source: /note="Description of Artificial Sequence: Synthetic peptide"
WWDDK

SEQ ID NO: 1638 - protein, 10 aa, Artificial Sequence
  source: /note="Description of Artificial Sequence: Synthetic peptide"
SMITNWYFDV

SEQ ID NO: 1639 - protein, 266 aa, Artificial Sequence
  source: /note="Description of Artificial Sequence: Synthetic polypeptide"
QVTLRESGPALVKPTQTLTLTCTFSGFSLVPIQKVQDDTKTLIKTIVTRINDISHTQSVSSKQKVTGLDFIPGLHPILTLSKMDQTLAVYQQILTSMPSRNVIQISNDLENLRDLLHVLAFSKSCHLPWASGLETLDSLGGVLEASGYSTEVVALSRLQGSLQDMLWQLDLSPGCSTSGMSVGWIRQPPGKALEWLADIWWDDKKDYNPSLKSRLTISKDTSKNQVVLKVTNMDPADTATYYCARSMITNWYFDVWGAGTTVTVSS

SEQ ID NO: 1640 - protein, 596 aa, Artificial Sequence
  source: /note="Description of Artificial Sequence: Synthetic polypeptide"
QVTLRESGPALVKPTQTLTLTCTFSGFSLVPIQKVQDDTKTLIKTIVTRINDISHTQSVSSKQKVTGLDFIPGLHPILTLSKMDQTLAVYQQILTSMPSRNVIQISNDLENLRDLLHVLAFSKSCHLPWASGLETLDSLGGVLEASGYSTEVVALSRLQGSLQDMLWQLDLSPGCSTSGMSVGWIRQPPGKALEWLADIWWDDKKDYNPSLKSRLTISKDTSKNQVVLKVTNMDPADTATYYCARSMITNWYFDVWGAGTTVTVSSASTKGPSVFPLAPSSKSTSGGTAALGCLVKDYFPEPVTVSWNSGALTSGVHTFPAVLQSSGLYSLSSVVTVPSSSLGTQTYICNVNHKPSNTKVDKRVEPKSCDKTHTCPPCPAPELLGGPSVFLFPPKPKDTLMISRTPEVTCVVVAVSHEDPEVKFNWYVDGVEVHNAKTKPREEQYNSTYRVVSVLTVLHQDWLNGKEYKCKVSNKALAAPIEKTISKAKGQPREPQVYTLPPSREEMTKNQVSLTCLVKGFYPSDIAVEWESNGQPENNYKTTPPVLDSDGSFFLYSKLTVDKSRWQQGNVFSCSVMHEALHNHYTQKSLSLSPGK

SEQ ID NO: 1641 - protein, 10 aa, Artificial Sequence
  source: /note="Description of Artificial Sequence: Synthetic peptide"
KAQLSVGYMH

SEQ ID NO: 1642 - protein, 7 aa, Artificial Sequence
  source: /note="Description of Artificial Sequence: Synthetic peptide"
DTSKLAS

SEQ ID NO: 1643 - protein, 9 aa, Artificial Sequence
  source: /note="Description of Artificial Sequence: Synthetic peptide"
FQGSGYPFT

SEQ ID NO: 1644 - protein, 6 aa, Artificial Sequence
  source: /note="Description of Artificial Sequence: Synthetic peptide"
QLSVGY

SEQ ID NO: 1645 - protein, 3 aa, Artificial Sequence
  source: /note="Description of Artificial Sequence: Synthetic peptide"
DTS

SEQ ID NO: 1646 - protein, 6 aa, Artificial Sequence
  source: /note="Description of Artificial Sequence: Synthetic peptide"
GSGYPF

SEQ ID NO: 1647 - protein, 106 aa, Artificial Sequence; identical to SEQ ID NO: 15
  source: /note="Description of Artificial Sequence: Synthetic polypeptide"

SEQ ID NO: 1648 - protein, 213 aa, Artificial Sequence; identical to SEQ ID NO: 16
  source: /note="Description of Artificial Sequence: Synthetic polypeptide"

SEQ ID NO: 1649 - protein, 7 aa, Artificial Sequence
  source: /note="Description of Artificial Sequence: Synthetic peptide"
TSGMSVG

SEQ ID NO: 1650 - protein, 162 aa, Artificial Sequence
  source: /note="Description of Artificial Sequence: Synthetic polypeptide"
DIWWDVPIQKVQDDTKTLIKTIVTRINDISHTQSVSSKQKVTGLDFIPGLHPILTLSKMDQTLAVYQQILTSMPSRNVIQISNDLENLRDLLHVLAFSKSCHLPWASGLETLDSLGGVLEASGYSTEVVALSRLQGSLQDMLWQLDLSPGCDKKDYNPSLKS

SEQ ID NO: 1651 - protein, 10 aa, Artificial Sequence
  source: /note="Description of Artificial Sequence: Synthetic peptide"
SMITNWYFDV

SEQ ID NO: 1652 - protein, 9 aa, Artificial Sequence
  source: /note="Description of Artificial Sequence: Synthetic peptide"
GFSLSTSGM

SEQ ID NO: 1653 - protein, 151 aa, Artificial Sequence
  source: /note="Description of Artificial Sequence: Synthetic polypeptide"
WWDVPIQKVQDDTKTLIKTIVTRINDISHTQSVSSKQKVTGLDFIPGLHPILTLSKMDQTLAVYQQILTSMPSRNVIQISNDLENLRDLLHVLAFSKSCHLPWASGLETLDSLGGVLEASGYSTEVVALSRLQGSLQDMLWQLDLSPGCDK

SEQ ID NO: 1654 - protein, 10 aa, Artificial Sequence
  source: /note="Description of Artificial Sequence: Synthetic peptide"
SMITNWYFDV

SEQ ID NO: 1655 - protein, 266 aa, Artificial Sequence
  source: /note="Description of Artificial Sequence: Synthetic polypeptide"
QVTLRESGPALVKPTQTLTLTCTFSGFSLSTSGMSVGWIRQPPGKALEWLADIWWDVPIQKVQDDTKTLIKTIVTRINDISHTQSVSSKQKVTGLDFIPGLHPILTLSKMDQTLAVYQQILTSMPSRNVIQISNDLENLRDLLHVLAFSKSCHLPWASGLETLDSLGGVLEASGYSTEVVALSRLQGSLQDMLWQLDLSPGCDKKDYNPSLKSRLTISKDTSKNQVVLKVTNMDPADTATYYCARSMITNWYFDVWGAGTTVTVSS

SEQ ID NO: 1656 - protein, 596 aa, Artificial Sequence
  source: /note="Description of Artificial Sequence: Synthetic polypeptide"
QVTLRESGPALVKPTQTLTLTCTFSGFSLSTSGMSVGWIRQPPGKALEWLADIWWDVPIQKVQDDTKTLIKTIVTRINDISHTQSVSSKQKVTGLDFIPGLHPILTLSKMDQTLAVYQQILTSMPSRNVIQISNDLENLRDLLHVLAFSKSCHLPWASGLETLDSLGGVLEASGYSTEVVALSRLQGSLQDMLWQLDLSPGCDKKDYNPSLKSRLTISKDTSKNQVVLKVTNMDPADTATYYCARSMITNWYFDVWGAGTTVTVSSASTKGPSVFPLAPSSKSTSGGTAALGCLVKDYFPEPVTVSWNSGALTSGVHTFPAVLQSSGLYSLSSVVTVPSSSLGTQTYICNVNHKPSNTKVDKRVEPKSCDKTHTCPPCPAPELLGGPSVFLFPPKPKDTLMISRTPEVTCVVVAVSHEDPEVKFNWYVDGVEVHNAKTKPREEQYNSTYRVVSVLTVLHQDWLNGKEYKCKVSNKALAAPIEKTISKAKGQPREPQVYTLPPSREEMTKNQVSLTCLVKGFYPSDIAVEWESNGQPENNYKTTPPVLDSDGSFFLYSKLTVDKSRWQQGNVFSCSVMHEALHNHYTQKSLSLSPGK

SEQ ID NO: 1657 - protein, 10 aa, Artificial Sequence
  source: /note="Description of Artificial Sequence: Synthetic peptide"
KAQLSVGYMH

SEQ ID NO: 1658 - protein, 7 aa, Artificial Sequence
  source: /note="Description of Artificial Sequence: Synthetic peptide"
DTSKLAS

SEQ ID NO: 1659 - protein, 9 aa, Artificial Sequence
  source: /note="Description of Artificial Sequence: Synthetic peptide"
FQGSGYPFT

SEQ ID NO: 1660 - protein, 6 aa, Artificial Sequence
  source: /note="Description of Artificial Sequence: Synthetic peptide"
QLSVGY

SEQ ID NO: 1661 - protein, 3 aa, Artificial Sequence
  source: /note="Description of Artificial Sequence: Synthetic peptide"
DTS

SEQ ID NO: 1662 - protein, 6 aa, Artificial Sequence
  source: /note="Description of Artificial Sequence: Synthetic peptide"
GSGYPF

SEQ ID NO: 1663 - protein, 106 aa, Artificial Sequence; identical to SEQ ID NO: 15
  source: /note="Description of Artificial Sequence: Synthetic polypeptide"

SEQ ID NO: 1664 - protein, 213 aa, Artificial Sequence; identical to SEQ ID NO: 16
  source: /note="Description of Artificial Sequence: Synthetic polypeptide"

SEQ ID NO: 1665 - protein, 7 aa, Artificial Sequence
  source: /note="Description of Artificial Sequence: Synthetic peptide"
TSGMSVG

SEQ ID NO: 1666 - protein, 16 aa, Artificial Sequence
  source: /note="Description of Artificial Sequence: Synthetic peptide"
DIWWDDKKDYNPSLKS

SEQ ID NO: 1667 - protein, 156 aa, Artificial Sequence
  source: /note="Description of Artificial Sequence: Synthetic polypeptide"
SMITVPIQKVQDDTKTLIKTIVTRINDISHTQSVSSKQKVTGLDFIPGLHPILTLSKMDQTLAVYQQILTSMPSRNVIQISNDLENLRDLLHVLAFSKSCHLPWASGLETLDSLGGVLEASGYSTEVVALSRLQGSLQDMLWQLDLSPGCNWYFDV

SEQ ID NO: 1668 - protein, 9 aa, Artificial Sequence
  source: /note="Description of Artificial Sequence: Synthetic peptide"
GFSLSTSGM

SEQ ID NO: 1669 - protein, 5 aa, Artificial Sequence
  source: /note="Description of Artificial Sequence: Synthetic peptide"
WWDDK

SEQ ID NO: 1670 - protein, 156 aa, Artificial Sequence; identical to SEQ ID NO: 1667
  source: /note="Description of Artificial Sequence: Synthetic polypeptide"

SEQ ID NO: 1671 - protein, 266 aa, Artificial Sequence
  source: /note="Description of Artificial Sequence: Synthetic polypeptide"
QVTLRESGPALVKPTQTLTLTCTFSGFSLSTSGMSVGWIRQPPGKALEWLADIWWDDKKDYNPSLKSRLTISKDTSKNQVVLKVTNMDPADTATYYCARSMITVPIQKVQDDTKTLIKTIVTRINDISHTQSVSSKQKVTGLDFIPGLHPILTLSKMDQTLAVYQQILTSMPSRNVIQISNDLENLRDLLHVLAFSKSCHLPWASGLETLDSLGGVLEASGYSTEVVALSRLQGSLQDMLWQLDLSPGCNWYFDVWGAGTTVTVSS

SEQ ID NO: 1672 - protein, 596 aa, Artificial Sequence
  source: /note="Description of Artificial Sequence: Synthetic polypeptide"
QVTLRESGPALVKPTQTLTLTCTFSGFSLSTSGMSVGWIRQPPGKALEWLADIWWDDKKDYNPSLKSRLTISKDTSKNQVVLKVTNMDPADTATYYCARSMITVPIQKVQDDTKTLIKTIVTRINDISHTQSVSSKQKVTGLDFIPGLHPILTLSKMDQTLAVYQQILTSMPSRNVIQISNDLENLRDLLHVLAFSKSCHLPWASGLETLDSLGGVLEASGYSTEVVALSRLQGSLQDMLWQLDLSPGCNWYFDVWGAGTTVTVSSASTKGPSVFPLAPSSKSTSGGTAALGCLVKDYFPEPVTVSWNSGALTSGVHTFPAVLQSSGLYSLSSVVTVPSSSLGTQTYICNVNHKPSNTKVDKRVEPKSCDKTHTCPPCPAPELLGGPSVFLFPPKPKDTLMISRTPEVTCVVVAVSHEDPEVKFNWYVDGVEVHNAKTKPREEQYNSTYRVVSVLTVLHQDWLNGKEYKCKVSNKALAAPIEKTISKAKGQPREPQVYTLPPSREEMTKNQVSLTCLVKGFYPSDIAVEWESNGQPENNYKTTPPVLDSDGSFFLYSKLTVDKSRWQQGNVFSCSVMHEALHNHYTQKSLSLSPGK

SEQ ID NO: 1673 - protein, 10 aa, Artificial Sequence
  source: /note="Description of Artificial Sequence: Synthetic peptide"
KAQLSVGYMH

SEQ ID NO: 1674 - protein, 7 aa, Artificial Sequence
  source: /note="Description of Artificial Sequence: Synthetic peptide"
DTSKLAS

SEQ ID NO: 1675 - protein, 9 aa, Artificial Sequence
  source: /note="Description of Artificial Sequence: Synthetic peptide"
FQGSGYPFT

SEQ ID NO: 1676 - protein, 6 aa, Artificial Sequence
  source: /note="Description of Artificial Sequence: Synthetic peptide"
QLSVGY

SEQ ID NO: 1677 - protein, 3 aa, Artificial Sequence
  source: /note="Description of Artificial Sequence: Synthetic peptide"
DTS

SEQ ID NO: 1678 - protein, 6 aa, Artificial Sequence
  source: /note="Description of Artificial Sequence: Synthetic peptide"
GSGYPF

SEQ ID NO: 1679 - protein, 106 aa, Artificial Sequence; identical to SEQ ID NO: 15
  source: /note="Description of Artificial Sequence: Synthetic polypeptide"

SEQ ID NO: 1680 - protein, 213 aa, Artificial Sequence; identical to SEQ ID NO: 16
  source: /note="Description of Artificial Sequence: Synthetic polypeptide"

SEQ ID NO: 1681 - protein, 7 aa, Artificial Sequence
  source: /note="Description of Artificial Sequence: Synthetic peptide"
TSGMSVG

SEQ ID NO: 1682 - protein, 15 aa, Artificial Sequence
  source: /note="Description of Artificial Sequence: Synthetic peptide"
DIWWDDKKDYNPSLK

SEQ ID NO: 1683 - protein, 10 aa, Artificial Sequence
  source: /note="Description of Artificial Sequence: Synthetic peptide"
SMITNWYFDV

SEQ ID NO: 1684 - protein, 9 aa, Artificial Sequence
  source: /note="Description of Artificial Sequence: Synthetic peptide"
GFSLSTSGM

SEQ ID NO: 1685 - protein, 5 aa, Artificial Sequence
  source: /note="Description of Artificial Sequence: Synthetic peptide"
WWDDK

SEQ ID NO: 1686 - protein, 10 aa, Artificial Sequence
  source: /note="Description of Artificial Sequence: Synthetic peptide"
SMITNWYFDV

SEQ ID NO: 1687 - protein, 120 aa, Artificial Sequence; identical to SEQ ID NO: 55
  source: /note="Description of Artificial Sequence: Synthetic polypeptide"

SEQ ID NO: 1688 - protein, 450 aa, Artificial Sequence; identical to SEQ ID NO: 56
  source: /note="Description of Artificial Sequence: Synthetic polypeptide"

SEQ ID NO: 1689 - protein, 156 aa, Artificial Sequence
  source: /note="Description of Artificial Sequence: Synthetic polypeptide"
KAQLSVPIQKVQDDTKTLIKTIVTRINDISHTQSVSSKQKVTGLDFIPGLHPILTLSKMDQTLAVYQQILTSMPSRNVIQISNDLENLRDLLHVLAFSKSCHLPWASGLETLDSLGGVLEASGYSTEVVALSRLQGSLQDMLWQLDLSPGCVGYMH

SEQ ID NO: 1690 - protein, 7 aa, Artificial Sequence
  source: /note="Description of Artificial Sequence: Synthetic peptide"
DTSKLAS

SEQ ID NO: 1691 - protein, 9 aa, Artificial Sequence
  source: /note="Description of Artificial Sequence: Synthetic peptide"
FQGSGYPFT

SEQ ID NO: 1692 - protein, 152 aa, Artificial Sequence
  source: /note="Description of Artificial Sequence: Synthetic polypeptide"
QLSVPIQKVQDDTKTLIKTIVTRINDISHTQSVSSKQKVTGLDFIPGLHPILTLSKMDQTLAVYQQILTSMPSRNVIQISNDLENLRDLLHVLAFSKSCHLPWASGLETLDSLGGVLEASGYSTEVVALSRLQGSLQDMLWQLDLSPGCVGY

SEQ ID NO: 1693 - protein, 3 aa, Artificial Sequence
  source: /note="Description of Artificial Sequence: Synthetic peptide"
DTS

SEQ ID NO: 1694 - protein, 6 aa, Artificial Sequence
  source: /note="Description of Artificial Sequence: Synthetic peptide"
GSGYPF

SEQ ID NO: 1695 - protein, 252 aa, Artificial Sequence
  source: /note="Description of Artificial Sequence: Synthetic polypeptide"
DIQMTQSPSTLSASVGDRVTITCKAQLSVPIQKVQDDTKTLIKTIVTRINDISHTQSVSSKQKVTGLDFIPGLHPILTLSKMDQTLAVYQQILTSMPSRNVIQISNDLENLRDLLHVLAFSKSCHLPWASGLETLDSLGGVLEASGYSTEVVALSRLQGSLQDMLWQLDLSPGCVGYMHWYQQKPGKAPKLLIYDTSKLASGVPSRFSGSGSGTEFTLTISSLQPDDFATYYCFQGSGYPFTFGGGTKLEIK

SEQ ID NO: 1696 - protein, 359 aa, Artificial Sequence
  source: /note="Description of Artificial Sequence: Synthetic polypeptide"
DIQMTQSPSTLSASVGDRVTITCKAQLSVPIQKVQDDTKTLIKTIVTRINDISHTQSVSSKQKVTGLDFIPGLHPILTLSKMDQTLAVYQQILTSMPSRNVIQISNDLENLRDLLHVLAFSKSCHLPWASGLETLDSLGGVLEASGYSTEVVALSRLQGSLQDMLWQLDLSPGCVGYMHWYQQKPGKAPKLLIYDTSKLASGVPSRFSGSGSGTEFTLTISSLQPDDFATYYCFQGSGYPFTFGGGTKLEIKRTVAAPSVFIFPPSDEQLKSGTASVVCLLNNFYPREAKVQWKVDNALQSGNSQESVTEQDSKDSTYSLSSTLTLSKADYEKHKVYACEVTHQGLSSPVTKSFNRGEC

SEQ ID NO: 1697 - protein, 7 aa, Artificial Sequence
  source: /note="Description of Artificial Sequence: Synthetic peptide"
TSGMSVG

SEQ ID NO: 1698 - protein, 15 aa, Artificial Sequence
  source: /note="Description of Artificial Sequence: Synthetic peptide"
DIWWDDKKDYNPSLK

SEQ ID NO: 1699 - protein, 10 aa, Artificial Sequence
  source: /note="Description of Artificial Sequence: Synthetic peptide"
SMITNWYFDV

SEQ ID NO: 1700 - protein, 9 aa, Artificial Sequence
  source: /note="Description of Artificial Sequence: Synthetic peptide"
GFSLSTSGM

SEQ ID NO: 1701 - protein, 5 aa, Artificial Sequence
  source: /note="Description of Artificial Sequence: Synthetic peptide"
WWDDK

SEQ ID NO: 1702 - protein, 10 aa, Artificial Sequence
  source: /note="Description of Artificial Sequence: Synthetic peptide"
SMITNWYFDV

SEQ ID NO: 1703 - protein, 120 aa, Artificial Sequence; identical to SEQ ID NO: 55
  source: /note="Description of Artificial Sequence: Synthetic polypeptide"

SEQ ID NO: 1704 - protein, 450 aa, Artificial Sequence; identical to SEQ ID NO: 56
  source: /note="Description of Artificial Sequence: Synthetic polypeptide"

SEQ ID NO: 1705 - protein, 10 aa, Artificial Sequence
  source: /note="Description of Artificial Sequence: Synthetic peptide"
KAQLSVGYMH

SEQ ID NO: 1706 - protein, 153 aa, Artificial Sequence
  source: /note="Description of Artificial Sequence: Synthetic polypeptide"
DTVPIQKVQDDTKTLIKTIVTRINDISHTQSVSSKQKVTGLDFIPGLHPILTLSKMDQTLAVYQQILTSMPSRNVIQISNDLENLRDLLHVLAFSKSCHLPWASGLETLDSLGGVLEASGYSTEVVALSRLQGSLQDMLWQLDLSPGCSKLAS

SEQ ID NO: 1707 - protein, 9 aa, Artificial Sequence
  source: /note="Description of Artificial Sequence: Synthetic peptide"
FQGSGYPFT

SEQ ID NO: 1708 - protein, 6 aa, Artificial Sequence
  source: /note="Description of Artificial Sequence: Synthetic peptide"
QLSVGY

SEQ ID NO: 1709 - protein, 149 aa, Artificial Sequence
  source: /note="Description of Artificial Sequence: Synthetic polypeptide"
DTVPIQKVQDDTKTLIKTIVTRINDISHTQSVSSKQKVTGLDFIPGLHPILTLSKMDQTLAVYQQILTSMPSRNVIQISNDLENLRDLLHVLAFSKSCHLPWASGLETLDSLGGVLEASGYSTEVVALSRLQGSLQDMLWQLDLSPGCS

SEQ ID NO: 1710 - protein, 6 aa, Artificial Sequence
  source: /note="Description of Artificial Sequence: Synthetic peptide"
GSGYPF

SEQ ID NO: 1711 - protein, 252 aa, Artificial Sequence
  source: /note="Description of Artificial Sequence: Synthetic polypeptide"
DIQMTQSPSTLSASVGDRVTITCKAQLSVGYMHWYQQKPGKAPKLLIYDTVPIQKVQDDTKTLIKTIVTRINDISHTQSVSSKQKVTGLDFIPGLHPILTLSKMDQTLAVYQQILTSMPSRNVIQISNDLENLRDLLHVLAFSKSCHLPWASGLETLDSLGGVLEASGYSTEVVALSRLQGSLQDMLWQLDLSPGCSKLASGVPSRFSGSGSGTEFTLTISSLQPDDFATYYCFQGSGYPFTFGGGTKLEIK

SEQ ID NO: 1712 - protein, 359 aa, Artificial Sequence
  source: /note="Description of Artificial Sequence: Synthetic polypeptide"
DIQMTQSPSTLSASVGDRVTITCKAQLSVGYMHWYQQKPGKAPKLLIYDTVPIQKVQDDTKTLIKTIVTRINDISHTQSVSSKQKVTGLDFIPGLHPILTLSKMDQTLAVYQQILTSMPSRNVIQISNDLENLRDLLHVLAFSKSCHLPWASGLETLDSLGGVLEASGYSTEVVALSRLQGSLQDMLWQLDLSPGCSKLASGVPSRFSGSGSGTEFTLTISSLQPDDFATYYCFQGSGYPFTFGGGTKLEIKRTVAAPSVFIFPPSDEQLKSGTASVVCLLNNFYPREAKVQWKVDNALQSGNSQESVTEQDSKDSTYSLSSTLTLSKADYEKHKVYACEVTHQGLSSPVTKSFNRGEC

SEQ ID NO: 1713 - protein, 7 aa, Artificial Sequence
  source: /note="Description of Artificial Sequence: Synthetic peptide"
TSGMSVG

SEQ ID NO: 1714 - protein, 15 aa, Artificial Sequence
  source: /note="Description of Artificial Sequence: Synthetic peptide"
DIWWDDKKDYNPSLK

SEQ ID NO: 1715 - protein, 10 aa, Artificial Sequence
  source: /note="Description of Artificial Sequence: Synthetic peptide"
SMITNWYFDV

SEQ ID NO: 1716 - protein, 9 aa, Artificial Sequence
  source: /note="Description of Artificial Sequence: Synthetic peptide"
GFSLSTSGM

SEQ ID NO: 1717 - protein, 5 aa, Artificial Sequence
  source: /note="Description of Artificial Sequence: Synthetic peptide"
WWDDK

SEQ ID NO: 1718 - protein, 10 aa, Artificial Sequence
  source: /note="Description of Artificial Sequence: Synthetic peptide"
SMITNWYFDV

SEQ ID NO: 1719 - protein, 120 aa, Artificial Sequence; identical to SEQ ID NO: 55
  source: /note="Description of Artificial Sequence: Synthetic polypeptide"

SEQ ID NO: 1720 - protein, 450 aa, Artificial Sequence; identical to SEQ ID NO: 56
  source: /note="Description of Artificial Sequence: Synthetic polypeptide"

SEQ ID NO: 1721 - protein, 10 aa, Artificial Sequence
  source: /note="Description of Artificial Sequence: Synthetic peptide"
KAQLSVGYMH

SEQ ID NO: 1722 - protein, 7 aa, Artificial Sequence
  source: /note="Description of Artificial Sequence: Synthetic peptide"
DTSKLAS

SEQ ID NO: 1723 - protein, 155 aa, Artificial Sequence
  source: /note="Description of Artificial Sequence: Synthetic polypeptide"
FQGSGVPIQKVQDDTKTLIKTIVTRINDISHTQSVSSKQKVTGLDFIPGLHPILTLSKMDQTLAVYQQILTSMPSRNVIQISNDLENLRDLLHVLAFSKSCHLPWASGLETLDSLGGVLEASGYSTEVVALSRLQGSLQDMLWQLDLSPGCYPFT

SEQ ID NO: 1724 - protein, 6 aa, Artificial Sequence
  source: /note="Description of Artificial Sequence: Synthetic peptide"
QLSVGY

SEQ ID NO: 1725 - protein, 3 aa, Artificial Sequence
  source: /note="Description of Artificial Sequence: Synthetic peptide"
DTS

SEQ ID NO: 1726 - protein, 152 aa, Artificial Sequence
  source: /note="Description of Artificial Sequence: Synthetic polypeptide"
GSGVPIQKVQDDTKTLIKTIVTRINDISHTQSVSSKQKVTGLDFIPGLHPILTLSKMDQTLAVYQQILTSMPSRNVIQISNDLENLRDLLHVLAFSKSCHLPWASGLETLDSLGGVLEASGYSTEVVALSRLQGSLQDMLWQLDLSPGCYPF

SEQ ID NO: 1727 - protein, 252 aa, Artificial Sequence
  source: /note="Description of Artificial Sequence: Synthetic polypeptide"
DIQMTQSPSTLSASVGDRVTITCKAQLSVGYMHWYQQKPGKAPKLLIYDTSKLASGVPSRFSGSGSGTEFTLTISSLQPDDFATYYCFQGSGVPIQKVQDDTKTLIKTIVTRINDISHTQSVSSKQKVTGLDFIPGLHPILTLSKMDQTLAVYQQILTSMPSRNVIQISNDLENLRDLLHVLAFSKSCHLPWASGLETLDSLGGVLEASGYSTEVVALSRLQGSLQDMLWQLDLSPGCYPFTFGGGTKLEIK

SEQ ID NO: 1728 - protein, 359 aa, Artificial Sequence
  source: /note="Description of Artificial Sequence: Synthetic polypeptide"
DIQMTQSPSTLSASVGDRVTITCKAQLSVGYMHWYQQKPGKAPKLLIYDTSKLASGVPSRFSGSGSGTEFTLTISSLQPDDFATYYCFQGSGVPIQKVQDDTKTLIKTIVTRINDISHTQSVSSKQKVTGLDFIPGLHPILTLSKMDQTLAVYQQILTSMPSRNVIQISNDLENLRDLLHVLAFSKSCHLPWASGLETLDSLGGVLEASGYSTEVVALSRLQGSLQDMLWQLDLSPGCYPFTFGGGTKLEIKRTVAAPSVFIFPPSDEQLKSGTASVVCLLNNFYPREAKVQWKVDNALQSGNSQESVTEQDSKDSTYSLSSTLTLSKADYEKHKVYACEVTHQGLSSPVTKSFNRGEC

SEQ ID NO: 1729 - protein, 203 aa, Artificial Sequence
  source: /note="Description of Artificial Sequence: Synthetic polypeptide"
AIGSCSKEYRVLLGQLQKQTDLMQDTSRLLDPYIRIQGLDVPKLREHCRERPGAFPSEETLRGLGRRGFLQTLNATLGCVLHRLADLEQRLPKAQDLERSGLNIEDLEKLQMARPNILGLRNNIYCMAQLLDNSDTAEPTKAGRGASQPPTPTPASDAFQRKLEGCRFLHGYHRFMHSVGRVFSKWGESPNRSRRSTSGMSVG

SEQ ID NO: 1730 - protein, 16 aa, Artificial Sequence
  source: /note="Description of Artificial Sequence: Synthetic peptide"
DIWWDDKKDYNPSLKS

SEQ ID NO: 1731 - protein, 10 aa, Artificial Sequence
  source: /note="Description of Artificial Sequence: Synthetic peptide"
SMITNWYFDV

SEQ ID NO: 1732 - protein, 205 aa, Artificial Sequence
  source: /note="Description of Artificial Sequence: Synthetic polypeptide"
GFSLAAIGSCSKEYRVLLGQLQKQTDLMQDTSRLLDPYIRIQGLDVPKLREHCRERPGAFPSEETLRGLGRRGFLQTLNATLGCVLHRLADLEQRLPKAQDLERSGLNIEDLEKLQMARPNILGLRNNIYCMAQLLDNSDTAEPTKAGRGASQPPTPTPASDAFQRKLEGCRFLHGYHRFMHSVGRVFSKWGESPNRSRRSTSGM

SEQ ID NO: 1733 - protein, 5 aa, Artificial Sequence
  source: /note="Description of Artificial Sequence: Synthetic peptide"
WWDDK

SEQ ID NO: 1734 - protein, 10 aa, Artificial Sequence
  source: /note="Description of Artificial Sequence: Synthetic peptide"
SMITNWYFDV

SEQ ID NO: 1735 - protein, 316 aa, Artificial Sequence
  source: /note="Description of Artificial Sequence: Synthetic polypeptide"
QVTLRESGPALVKPTQTLTLTCTFSGFSLAAIGSCSKEYRVLLGQLQKQTDLMQDTSRLLDPYIRIQGLDVPKLREHCRERPGAFPSEETLRGLGRRGFLQTLNATLGCVLHRLADLEQRLPKAQDLERSGLNIEDLEKLQMARPNILGLRNNIYCMAQLLDNSDTAEPTKAGRGASQPPTPTPASDAFQRKLEGCRFLHGYHRFMHSVGRVFSKWGESPNRSRRSTSGMSVGWIRQPPGKALEWLADIWWDDKKDYNPSLKSRLTISKDTSKNQVVLKVTNMDPADTATYYCARSMITNWYFDVWGAGTTVTVSS

SEQ ID NO: 1736 - protein, 646 aa, Artificial Sequence
  source: /note="Description of Artificial Sequence: Synthetic polypeptide"
QVTLRESGPALVKPTQTLTLTCTFSGFSLAAIGSCSKEYRVLLGQLQKQTDLMQDTSRLLDPYIRIQGLDVPKLREHCRERPGAFPSEETLRGLGRRGFLQTLNATLGCVLHRLADLEQRLPKAQDLERSGLNIEDLEKLQMARPNILGLRNNIYCMAQLLDNSDTAEPTKAGRGASQPPTPTPASDAFQRKLEGCRFLHGYHRFMHSVGRVFSKWGESPNRSRRSTSGMSVGWIRQPPGKALEWLADIWWDDKKDYNPSLKSRLTISKDTSKNQVVLKVTNMDPADTATYYCARSMITNWYFDVWGAGTTVTVSSASTKGPSVFPLAPSSKSTSGGTAALGCLVKDYFPEPVTVSWNSGALTSGVHTFPAVLQSSGLYSLSSVVTVPSSSLGTQTYICNVNHKPSNTKVDKRVEPKSCDKTHTCPPCPAPELLGGPSVFLFPPKPKDTLMISRTPEVTCVVVAVSHEDPEVKFNWYVDGVEVHNAKTKPREEQYNSTYRVVSVLTVLHQDWLNGKEYKCKVSNKALAAPIEKTISKAKGQPREPQVYTLPPSREEMTKNQVSLTCLVKGFYPSDIAVEWESNGQPENNYKTTPPVLDSDGSFFLYSKLTVDKSRWQQGNVFSCSVMHEALHNHYTQKSLSLSPGK

SEQ ID NO: 1737 - protein, 10 aa, Artificial Sequence
  source: /note="Description of Artificial Sequence: Synthetic peptide"
KAQLSVGYMH

SEQ ID NO: 1738 - protein, 7 aa, Artificial Sequence
  source: /note="Description of Artificial Sequence: Synthetic peptide"
DTSKLAS

SEQ ID NO: 1739 - protein, 9 aa, Artificial Sequence
  source: /note="Description of Artificial Sequence: Synthetic peptide"
FQGSGYPFT

SEQ ID NO: 1740 - protein, 6 aa, Artificial Sequence
  source: /note="Description of Artificial Sequence: Synthetic peptide"
QLSVGY

SEQ ID NO: 1741 - protein, 3 aa, Artificial Sequence
  source: /note="Description of Artificial Sequence: Synthetic peptide"
DTS

SEQ ID NO: 1742 - protein, 6 aa, Artificial Sequence
  source: /note="Description of Artificial Sequence: Synthetic peptide"
GSGYPF

SEQ ID NO: 1743 - protein, 106 aa, Artificial Sequence; identical to SEQ ID NO: 15
  source: /note="Description of Artificial Sequence: Synthetic polypeptide"

SEQ ID NO: 1744 - protein, 213 aa, Artificial Sequence; identical to SEQ ID NO: 16
  source: /note="Description of Artificial Sequence: Synthetic polypeptide"

SEQ ID NO: 1745 - protein, 7 aa, Artificial Sequence
  source: /note="Description of Artificial Sequence: Synthetic peptide"
TSGMSVG

SEQ ID NO: 1746 - protein, 212 aa, Artificial Sequence
  source: /note="Description of Artificial Sequence: Synthetic polypeptide"
DIWWDAAIGSCSKEYRVLLGQLQKQTDLMQDTSRLLDPYIRIQGLDVPKLREHCRERPGAFPSEETLRGLGRRGFLQTLNATLGCVLHRLADLEQRLPKAQDLERSGLNIEDLEKLQMARPNILGLRNNIYCMAQLLDNSDTAEPTKAGRGASQPPTPTPASDAFQRKLEGCRFLHGYHRFMHSVGRVFSKWGESPNRSRRDKKDYNPSLKS

SEQ ID NO: 1747 - protein, 10 aa, Artificial Sequence
  source: /note="Description of Artificial Sequence: Synthetic peptide"
SMITNWYFDV

SEQ ID NO: 1748 - protein, 9 aa, Artificial Sequence
  source: /note="Description of Artificial Sequence: Synthetic peptide"
GFSLSTSGM

SEQ ID NO: 1749 - protein, 201 aa, Artificial Sequence
  source: /note="Description of Artificial Sequence: Synthetic polypeptide"
WWDAAIGSCSKEYRVLLGQLQKQTDLMQDTSRLLDPYIRIQGLDVPKLREHCRERPGAFPSEETLRGLGRRGFLQTLNATLGCVLHRLADLEQRLPKAQDLERSGLNIEDLEKLQMARPNILGLRNNIYCMAQLLDNSDTAEPTKAGRGASQPPTPTPASDAFQRKLEGCRFLHGYHRFMHSVGRVFSKWGESPNRSRRDK

SEQ ID NO: 1750 - protein, 10 aa, Artificial Sequence
  source: /note="Description of Artificial Sequence: Synthetic peptide"
SMITNWYFDV

SEQ ID NO: 1751 - protein, 316 aa, Artificial Sequence
  source: /note="Description of Artificial Sequence: Synthetic polypeptide"
QVTLRESGPALVKPTQTLTLTCTFSGFSLSTSGMSVGWIRQPPGKALEWLADIWWDAAIGSCSKEYRVLLGQLQKQTDLMQDTSRLLDPYIRIQGLDVPKLREHCRERPGAFPSEETLRGLGRRGFLQTLNATLGCVLHRLADLEQRLPKAQDLERSGLNIEDLEKLQMARPNILGLRNNIYCMAQLLDNSDTAEPTKAGRGASQPPTPTPASDAFQRKLEGCRFLHGYHRFMHSVGRVFSKWGESPNRSRRDKKDYNPSLKSRLTISKDTSANQVVLKVTNMDPADTATYYCARSMITNWYFDVWGAGTTVTVSS

SEQ ID NO: 1752 - protein, 646 aa, Artificial Sequence
  source: /note="Description of Artificial Sequence: Synthetic polypeptide"
QVTLRESGPALVKPTQTLTLTCTFSGFSLSTSGMSVGWIRQPPGKALEWLADIWWDAAIGSCSKEYRVLLGQLQKQTDLMQDTSRLLDPYIRIQGLDVPKLREHCRERPGAFPSEETLRGLGRRGFLQTLNATLGCVLHRLADLEQRLPKAQDLERSGLNIEDLEKLQMARPNILGLRNNIYCMAQLLDNSDTAEPTKAGRGASQPPTPTPASDAFQRKLEGCRFLHGYHRFMHSVGRVFSKWGESPNRSRRDKKDYNPSLKSRLTISKDTSANQVVLKVTNMDPADTATYYCARSMITNWYFDVWGAGTTVTVSSASTKGPSVFPLAPSSKSTSGGTAALGCLVKDYFPEPVTVSWNSGALTSGVHTFPAVLQSSGLYSLSSVVTVPSSSLGTQTYICNVNHKPSNTKVDKRVEPKSCDKTHTCPPCPAPELLGGPSVFLFPPKPKDTLMISRTPEVTCVVVAVSHEDPEVKFNWYVDGVEVHNAKTKPREEQYNSTYRVVSVLTVLHQDWLNGKEYKCKVSNKALAAPIEKTISKAKGQPREPQVYTLPPSREEMTKNQVSLTCLVKGFYPSDIAVEWESNGQPENNYKTTPPVLDSDGSFFLYSKLTVDKSRWQQGNVFSCSVMHEALHNHYTQKSLSLSPGK

SEQ ID NO: 1753 - protein, 10 aa, Artificial Sequence
  source: /note="Description of Artificial Sequence: Synthetic peptide"
KAQLSVGYMH

SEQ ID NO: 1754 - protein, 7 aa, Artificial Sequence
  source: /note="Description of Artificial Sequence: Synthetic peptide"
DTSKLAS

SEQ ID NO: 1755 - protein, 9 aa, Artificial Sequence
  source: /note="Description of Artificial Sequence: Synthetic peptide"
FQGSGYPFT

SEQ ID NO: 1756 - protein, 6 aa, Artificial Sequence
  source: /note="Description of Artificial Sequence: Synthetic peptide"
QLSVGY

SEQ ID NO: 1757 - protein, 3 aa, Artificial Sequence
  source: /note="Description of Artificial Sequence: Synthetic peptide"
DTS

SEQ ID NO: 1758 - protein, 6 aa, Artificial Sequence
  source: /note="Description of Artificial Sequence: Synthetic peptide"
GSGYPF

SEQ ID NO: 1759 - protein, 106 aa, Artificial Sequence; identical to SEQ ID NO: 15
  source: /note="Description of Artificial Sequence: Synthetic polypeptide"

SEQ ID NO: 1760 - protein, 213 aa, Artificial Sequence; identical to SEQ ID NO: 16
  source: /note="Description of Artificial Sequence: Synthetic polypeptide"

SEQ ID NO: 1761 - protein, 7 aa, Artificial Sequence
  source: /note="Description of Artificial Sequence: Synthetic peptide"
TSGMSVG

SEQ ID NO: 1762 - protein, 16 aa, Artificial Sequence
  source: /note="Description of Artificial Sequence: Synthetic peptide"
DIWWDDKKDYNPSLKS

SEQ ID NO: 1763 - protein, 206 aa, Artificial Sequence
  source: /note="Description of Artificial Sequence: Synthetic polypeptide"
SMITAAIGSCSKEYRVLLGQLQKQTDLMQDTSRLLDPYIRIQGLDVPKLREHCRERPGAFPSEETLRGLGRRGFLQTLNATLGCVLHRLADLEQRLPKAQDLERSGLNIEDLEKLQMARPNILGLRNNIYCMAQLLDNSDTAEPTKAGRGASQPPTPTPASDAFQRKLEGCRFLHGYHRFMHSVGRVFSKWGESPNRSRRNWYFDV

SEQ ID NO: 1764 - protein, 9 aa, Artificial Sequence
  source: /note="Description of Artificial Sequence: Synthetic peptide"
GFSLSTSGM

SEQ ID NO: 1765 - protein, 5 aa, Artificial Sequence
  source: /note="Description of Artificial Sequence: Synthetic peptide"
WWDDK

SEQ ID NO: 1766 - protein, 206 aa, Artificial Sequence; identical to SEQ ID NO: 1763
  source: /note="Description of Artificial Sequence: Synthetic polypeptide"

SEQ ID NO: 1767 - protein, 316 aa, Artificial Sequence
  source: /note="Description of Artificial Sequence: Synthetic polypeptide"
QVTLRESGPALVKPTQTLTLTCTFSGFSLSTSGMSVGWIRQPPGKALEWLADIWWDDKKDYNPSLKSRLTISKDTSKNQVVLKVTNMDPADTATYYCARSMITAAIGSCSKEYRVLLGQLQKQTDLMQDTSRLLDPYIRIQGLDVPKLREHCRERPGAFPSEETLRGLGRRGFLQTLNATLGCVLHRLADLEQRLPKAQDLERSGLNIEDLEKLQMARPNILGLRNNIYCMAQLLDNSDTAEPTKAGRGASQPPTPTPASDAFQRKLEGCRFLHGYHRFMHSVGRVFSKWGESPNRSRRNWYFDVWGAGTTVTVSS

SEQ ID NO: 1768 - protein, 646 aa, Artificial Sequence
  source: /note="Description of Artificial Sequence: Synthetic polypeptide"
QVTLRESGPALVKPTQTLTLTCTFSGFSLSTSGMSVGWIRQPPGKALEWLADIWWDDKKDYNPSLKSRLTISKDTSKNQVVLKVTNMDPADTATYYCARSMITAAIGSCSKEYRVLLGQLQKQTDLMQDTSRLLDPYIRIQGLDVPKLREHCRERPGAFPSEETLRGLGRRGFLQTLNATLGCVLHRLADLEQRLPKAQDLERSGLNIEDLEKLQMARPNILGLRNNIYCMAQLLDNSDTAEPTKAGRGASQPPTPTPASDAFQRKLEGCRFLHGYHRFMHSVGRVFSKWGESPNRSRRNWYFDVWGAGTTVTVSSASTKGPSVFPLAPSSKSTSGGTAALGCLVKDYFPEPVTVSWNSGALTSGVHTFPAVLQSSGLYSLSSVVTVPSSSLGTQTYICNVNHKPSNTKVDKRVEPKSCDKTHTCPPCPAPELLGGPSVFLFPPKPKDTLMISRTPEVTCVVVAVSHEDPEVKFNWYVDGVEVHNAKTKPREEQYNSTYRVVSVLTVLHQDWLNGKEYKCKVSNKALAAPIEKTISKAKGQPREPQVYTLPPSREEMTKNQVSLTCLVKGFYPSDIAVEWESNGQPENNYKTTPPVLDSDGSFFLYSKLTVDKSRWQQGNVFSCSVMHEALHNHYTQKSLSLSPGK

SEQ ID NO: 1769 - protein, 10 aa, Artificial Sequence
  source: /note="Description of Artificial Sequence: Synthetic peptide"
KAQLSVGYMH

SEQ ID NO: 1770 - protein, 7 aa, Artificial Sequence
  source: /note="Description of Artificial Sequence: Synthetic peptide"
DTSKLAS

SEQ ID NO: 1771 - protein, 9 aa, Artificial Sequence
  source: /note="Description of Artificial Sequence: Synthetic peptide"
FQGSGYPFT

SEQ ID NO: 1772 - protein, 6 aa, Artificial Sequence
  source: /note="Description of Artificial Sequence: Synthetic peptide"
QLSVGY

SEQ ID NO: 1773 - protein, 3 aa, Artificial Sequence
  source: /note="Description of Artificial Sequence: Synthetic peptide"
DTS

SEQ ID NO: 1774 - protein, 6 aa, Artificial Sequence
  source: /note="Description of Artificial Sequence: Synthetic peptide"
GSGYPF

SEQ ID NO: 1775 - protein, 106 aa, Artificial Sequence; identical to SEQ ID NO: 15
  source: /note="Description of Artificial Sequence: Synthetic polypeptide"

SEQ ID NO: 1776 - protein, 213 aa, Artificial Sequence; identical to SEQ ID NO: 16
  source: /note="Description of Artificial Sequence: Synthetic polypeptide"

SEQ ID NO: 1777 - protein, 7 aa, Artificial Sequence
  source: /note="Description of Artificial Sequence: Synthetic peptide"
TSGMSVG

SEQ ID NO: 1778 - protein, 15 aa, Artificial Sequence
  source: /note="Description of Artificial Sequence: Synthetic peptide"
DIWWDDKKDYNPSLK

SEQ ID NO: 1779 - protein, 10 aa, Artificial Sequence
  source: /note="Description of Artificial Sequence: Synthetic peptide"
SMITNWYFDV

SEQ ID NO: 1780 - protein, 9 aa, Artificial Sequence
  source: /note="Description of Artificial Sequence: Synthetic peptide"
GFSLSTSGM

SEQ ID NO: 1781 - protein, 5 aa, Artificial Sequence
  source: /note="Description of Artificial Sequence: Synthetic peptide"
WWDDK

SEQ ID NO: 1782 - protein, 10 aa, Artificial Sequence
  source: /note="Description of Artificial Sequence: Synthetic peptide"
SMITNWYFDV

SEQ ID NO: 1783 - protein, 120 aa, Artificial Sequence; identical to SEQ ID NO: 55
  source: /note="Description of Artificial Sequence: Synthetic polypeptide"

SEQ ID NO: 1784 - protein, 450 aa, Artificial Sequence; identical to SEQ ID NO: 56
  source: /note="Description of Artificial Sequence: Synthetic polypeptide"

SEQ ID NO: 1785 - protein, 206 aa, Artificial Sequence
  source: /note="Description of Artificial Sequence: Synthetic polypeptide"
KAQLSAAIGSCSKEYRVLLGQLQKQTDLMQDTSRLLDPYIRIQGLDVPKLREHCRERPGAFPSEETLRGLGRRGFLQTLNATLGCVLHRLADLEQRLPKAQDLERSGLNIEDLEKLQMARPNILGLRNNIYCMAQLLDNSDTAEPTKAGRGASQPPTPTPASDAFQRKLEGCRFLHGYHRFMHSVGRVFSKWGESPNRSRRVGYMH

SEQ ID NO: 1786 - protein, 7 aa, Artificial Sequence
  source: /note="Description of Artificial Sequence: Synthetic peptide"
DTSKLAS

SEQ ID NO: 1787 - protein, 9 aa, Artificial Sequence
  source: /note="Description of Artificial Sequence: Synthetic peptide"
FQGSGYPFT

SEQ ID NO: 1788 - protein, 202 aa, Artificial Sequence
  source: /note="Description of Artificial Sequence: Synthetic polypeptide"
QLSAAIGSCSKEYRVLLGQLQKQTDLMQDTSRLLDPYIRIQGLDVPKLREHCRERPGAFPSEETLRGLGRRGFLQTLNATLGCVLHRLADLEQRLPKAQDLERSGLNIEDLEKLQMARPNILGLRNNIYCMAQLLDNSDTAEPTKAGRGASQPPTPTPASDAFQRKLEGCRFLHGYHRFMHSVGRVFSKWGESPNRSRRVGY

SEQ ID NO: 1789 - protein, 3 aa, Artificial Sequence
  source: /note="Description of Artificial Sequence: Synthetic peptide"
DTS

SEQ ID NO: 1790 - protein, 6 aa, Artificial Sequence
  source: /note="Description of Artificial Sequence: Synthetic peptide"
GSGYPF

SEQ ID NO: 1791 - protein, 302 aa, Artificial Sequence
  source: /note="Description of Artificial Sequence: Synthetic polypeptide"
DIQMTQSPSTLSASVGDRVTITCKAQLSAAIGSCSKEYRVLLGQLQKQTDLMQDTSRLLDPYIRIQGLDVPKLREHCRERPGAFPSEETLRGLGRRGFLQTLNATLGCVLHRLADLEQRLPKAQDLERSGLNIEDLEKLQMARPNILGLRNNIYCMAQLLDNSDTAEPTKAGRGASQPPTPTPASDAFQRKLEGCRFLHGYHRFMHSVGRVFSKWGESPNRSRRVGYMHWYQQKPGKAPKLLIYDTSKLASGVPSRFSGSGSGTEFTLTISSLQPDDFATYYCFQGSGYPFTFGGGTKLEIK

SEQ ID NO: 1792 - protein, 409 aa, Artificial Sequence
  source: /note="Description of Artificial Sequence: Synthetic polypeptide"
DIQMTQSPSTLSASVGDRVTITCKAQLSAAIGSCSKEYRVLLGQLQKQTDLMQDTSRLLDPYIRIQGLDVPKLREHCRERPGAFPSEETLRGLGRRGFLQTLNATLGCVLHRLADLEQRLPKAQDLERSGLNIEDLEKLQMARPNILGLRNNIYCMAQLLDNSDTAEPTKAGRGASQPPTPTPASDAFQRKLEGCRFLHGYHRFMHSVGRVFSKWGESPNRSRRVGYMHWYQQKPGKAPKLLIYDTSKLASGVPSRFSGSGSGTEFTLTISSLQPDDFATYYCFQGSGYPFTFGGGTKLEIKRTVAAPSVFIFPPSDEQLKSGTASVVCLLNNFYPREAKVQWKVDNALQSGNSQESVTEQDSKDSTYSLSSTLTLSKADYEKHKVYACEVTHQGLSSPVTKSFNRGEC

SEQ ID NO: 1793 - protein, 7 aa, Artificial Sequence
  source: /note="Description of Artificial Sequence: Synthetic peptide"
TSGMSVG

SEQ ID NO: 1794 - protein, 15 aa, Artificial Sequence
  source: /note="Description of Artificial Sequence: Synthetic peptide"
DIWWDDKKDYNPSLK

SEQ ID NO: 1795 - protein, 10 aa, Artificial Sequence
  source: /note="Description of Artificial Sequence: Synthetic peptide"
SMITNWYFDV

SEQ ID NO: 1796 - protein, 9 aa, Artificial Sequence
  source: /note="Description of Artificial Sequence: Synthetic peptide"
GFSLSTSGM

SEQ ID NO: 1797 - protein, 5 aa, Artificial Sequence
  source: /note="Description of Artificial Sequence: Synthetic peptide"
WWDDK

SEQ ID NO: 1798 - protein, 10 aa, Artificial Sequence
  source: /note="Description of Artificial Sequence: Synthetic peptide"
SMITNWYFDV

SEQ ID NO: 1799 - protein, 120 aa, Artificial Sequence; identical to SEQ ID NO: 55
  source: /note="Description of Artificial Sequence: Synthetic polypeptide"

SEQ ID NO: 1800 - protein, 450 aa, Artificial Sequence; identical to SEQ ID NO: 56
  source: /note="Description of Artificial Sequence: Synthetic polypeptide"

SEQ ID NO: 1801 - protein, 10 aa, Artificial Sequence
  source: /note="Description of Artificial Sequence: Synthetic peptide"
KAQLSVGYMH

SEQ ID NO: 1802 - protein, 203 aa, Artificial Sequence
  source: /note="Description of Artificial Sequence: Synthetic polypeptide"
DTAAIGSCSKEYRVLLGQLQKQTDLMQDTSRLLDPYIRIQGLDVPKLREHCRERPGAFPSEETLRGLGRRGFLQTLNATLGCVLHRLADLEQRLPKAQDLERSGLNIEDLEKLQMARPNILGLRNNIYCMAQLLDNSDTAEPTKAGRGASQPPTPTPASDAFQRKLEGCRFLHGYHRFMHSVGRVFSKWGESPNRSRRSKLAS

SEQ ID NO: 1803 - protein, 9 aa, Artificial Sequence
  source: /note="Description of Artificial Sequence: Synthetic peptide"
FQGSGYPFT

SEQ ID NO: 1804 - protein, 6 aa, Artificial Sequence
  source: /note="Description of Artificial Sequence: Synthetic peptide"
QLSVGY

SEQ ID NO: 1805 - protein, 199 aa, Artificial Sequence
  source: /note="Description of Artificial Sequence: Synthetic polypeptide"
DTAAIGSCSKEYRVLLGQLQKQTDLMQDTSRLLDPYIRIQGLDVPKLREHCRERPGAFPSEETLRGLGRRGFLQTLNATLGCVLHRLADLEQRLPKAQDLERSGLNIEDLEKLQMARPNILGLRNNIYCMAQLLDNSDTAEPTKAGRGASQPPTPTPASDAFQRKLEGCRFLHGYHRFMHSVGRVFSKWGESPNRSRRS

SEQ ID NO: 1806 - protein, 6 aa, Artificial Sequence
  source: /note="Description of Artificial Sequence: Synthetic peptide"
GSGYPF

SEQ ID NO: 1807 - protein, 302 aa, Artificial Sequence
  source: /note="Description of Artificial Sequence: Synthetic polypeptide"
DIQMTQSPSTLSASVGDRVTITCKAQLSVGYMHWYQQKPGKAPKLLIYDTAAIGSCSKEYRVLLGQLQKQTDLMQDTSRLLDPYIRIQGLDVPKLREHCRERPGAFPSEETLRGLGRRGFLQTLNATLGCVLHRLADLEQRLPKAQDLERSGLNIEDLEKLQMARPNILGLRNNIYCMAQLLDNSDTAEPTKAGRGASQPPTPTPASDAFQRKLEGCRFLHGYHRFMHSVGRVFSKWGESPNRSRRSKLASGVPSRFSGSGSGTEFTLTISSLQPDDFATYYCFQGSGYPFTFGGGTKLEIK

SEQ ID NO: 1808 - protein, 409 aa, Artificial Sequence
  source: /note="Description of Artificial Sequence: Synthetic polypeptide"
DIQMTQSPSTLSASVGDRVTITCKAQLSVGYMHWYQQKPGKAPKLLIYDTAAIGSCSKEYRVLLGQLQKQTDLMQDTSRLLDPYIRIQGLDVPKLREHCRERPGAFPSEETLRGLGRRGFLQTLNATLGCVLHRLADLEQRLPKAQDLERSGLNIEDLEKLQMARPNILGLRNNIYCMAQLLDNSDTAEPTKAGRGASQPPTPTPASDAFQRKLEGCRFLHGYHRFMHSVGRVFSKWGESPNRSRRSKLASGVPSRFSGSGSGTEFTLTISSLQPDDFATYYCFQGSGYPFTFGGGTKLEIKRTVAAPSVFIFPPSDEQLKSGTASVVCLLNNFYPREAKVQWKVDNALQSGNSQESVTEQDSKDSTYSLSSTLTLSKADYEKHKVYACEVTHQGLSSPVTKSFNRGEC

SEQ ID NO: 1809 - protein, 7 aa, Artificial Sequence
  source: /note="Description of Artificial Sequence: Synthetic peptide"
TSGMSVG

SEQ ID NO: 1810 - protein, 15 aa, Artificial Sequence
  source: /note="Description of Artificial Sequence: Synthetic peptide"
DIWWDDKKDYNPSLK

SEQ ID NO: 1811 - protein, 10 aa, Artificial Sequence
  source: /note="Description of Artificial Sequence: Synthetic peptide"
SMITNWYFDV

SEQ ID NO: 1812 - protein, 9 aa, Artificial Sequence
  source: /note="Description of Artificial Sequence: Synthetic peptide"
GFSLSTSGM

SEQ ID NO: 1813 - protein, 5 aa, Artificial Sequence
  source: /note="Description of Artificial Sequence: Synthetic peptide"
WWDDK

SEQ ID NO: 1814 - protein, 10 aa, Artificial Sequence
  source: /note="Description of Artificial Sequence: Synthetic peptide"
SMITNWYFDV

SEQ ID NO: 1815 - protein, 120 aa, Artificial Sequence; identical to SEQ ID NO: 55
  source: /note="Description of Artificial Sequence: Synthetic polypeptide"

SEQ ID NO: 1816 - protein, 450 aa, Artificial Sequence; identical to SEQ ID NO: 56
  source: /note="Description of Artificial Sequence: Synthetic polypeptide"

SEQ ID NO: 1817 - protein, 10 aa, Artificial Sequence
  source: /note="Description of Artificial Sequence: Synthetic peptide"
KAQLSVGYMH

SEQ ID NO: 1818 - protein, 7 aa, Artificial Sequence
  source: /note="Description of Artificial Sequence: Synthetic peptide"
DTSKLAS

SEQ ID NO: 1819 - protein, 205 aa, Artificial Sequence
  source: /note="Description of Artificial Sequence: Synthetic polypeptide"
FQGSGAAIGSCSKEYRVLLGQLQKQTDLMQDTSRLLDPYIRIQGLDVPKLREHCRERPGAFPSEETLRGLGRRGFLQTLNATLGCVLHRLADLEQRLPKAQDLERSGLNIEDLEKLQMARPNILGLRNNIYCMAQLLDNSDTAEPTKAGRGASQPPTPTPASDAFQRKLEGCRFLHGYHRFMHSVGRVFSKWGESPNRSRRYPFT

SEQ ID NO: 1820 - protein, 6 aa, Artificial Sequence
  source: /note="Description of Artificial Sequence: Synthetic peptide"
QLSVGY

SEQ ID NO: 1821 - protein, 3 aa, Artificial Sequence
  source: /note="Description of Artificial Sequence: Synthetic peptide"
DTS

SEQ ID NO: 1822 - protein, 202 aa, Artificial Sequence
  source: /note="Description of Artificial Sequence: Synthetic polypeptide"
GSGAAIGSCSKEYRVLLGQLQKQTDLMQDTSRLLDPYIRIQGLDVPKLREHCRERPGAFPSEETLRGLGRRGFLQTLNATLGCVLHRLADLEQRLPKAQDLERSGLNIEDLEKLQMARPNILGLRNNIYCMAQLLDNSDTAEPTKAGRGASQPPTPTPASDAFQRKLEGCRFLHGYHRFMHSVGRVFSKWGESPNRSRRYPF

SEQ ID NO: 1823 - protein, 302 aa, Artificial Sequence
  source: /note="Description of Artificial Sequence: Synthetic polypeptide"
DIQMTQSPSTLSASVGDRVTITCKAQLSVGYMHWYQQKPGKAPKLLIYDTSKLASGVPSRFSGSGSGTEFTLTISSLQPDDFATYYCFQGSGAAIGSCSKEYRVLLGQLQKQTDLMQDTSRLLDPYIRIQGLDVPKLREHCRERPGAFPSEETLRGLGRRGFLQTLNATLGCVLHRLADLEQRLPKAQDLERSGLNIEDLEKLQMARPNILGLRNNIYCMAQLLDNSDTAEPTKAGRGASQPPTPTPASDAFQRKLEGCRFLHGYHRFMHSVGRVFSKWGESPNRSRRYPFTFGGGTKLEIK

SEQ ID NO: 1824 - protein, 409 aa, Artificial Sequence
  source: /note="Description of Artificial Sequence: Synthetic polypeptide"
DIQMTQSPSTLSASVGDRVTITCKAQLSVGYMHWYQQKPGKAPKLLIYDTSKLASGVPSRFSGSGSGTEFTLTISSLQPDDFATYYCFQGSGAAIGSCSKEYRVLLGQLQKQTDLMQDTSRLLDPYIRIQGLDVPKLREHCRERPGAFPSEETLRGLGRRGFLQTLNATLGCVLHRLADLEQRLPKAQDLERSGLNIEDLEKLQMARPNILGLRNNIYCMAQLLDNSDTAEPTKAGRGASQPPTPTPASDAFQRKLEGCRFLHGYHRFMHSVGRVFSKWGESPNRSRRYPFTFGGGTKLEIKRTVAAPSVFIFPPSDEQLKSGTASVVCLLNNFYPREAKVQWKVDNALQSGNSQESVTEQDSKDSTYSLSSTLTLSKADYEKHKVYACEVTHQGLSSPVTKSFNRGEC

SEQ ID NO: 1825 - protein, 173 aa, Artificial Sequence
  source: /note="Description of Artificial Sequence: Synthetic polypeptide"
PPRLICDSRVLERYLLEAKEAENITTGCAEHCSLNENITVPDTKVNFYAWKRMEVGQQAVEVWQGLALLSEAVLRGQALLVNSSQPWEPLQLHVDKAVSGLRSLTTLLRALGAQKEAISPPDAASAAPLRTITADTFRKLFRVYSNFLRGKLKLYTGEACRTGDRSTSGMSVG

SEQ ID NO: 1826 - protein, 16 aa, Artificial Sequence
  source: /note="Description of Artificial Sequence: Synthetic peptide"
DIWWDDKKDYNPSLKS

SEQ ID NO: 1827 - protein, 10 aa, Artificial Sequence
  source: /note="Description of Artificial Sequence: Synthetic peptide"
SMITNWYFDV

SEQ ID NO: 1828 - protein, 175 aa, Artificial Sequence
  source: /note="Description of Artificial Sequence: Synthetic polypeptide"
GFSLAPPRLICDSRVLERYLLEAKEAENITTGCAEHCSLNENITVPDTKVNFYAWKRMEVGQQAVEVWQGLALLSEAVLRGQALLVNSSQPWEPLQLHVDKAVSGLRSLTTLLRALGAQKEAISPPDAASAAPLRTITADTFRKLFRVYSNFLRGKLKLYTGEACRTGDRSTSGM

SEQ ID NO: 1829 - protein, 5 aa, Artificial Sequence
  source: /note="Description of Artificial Sequence: Synthetic peptide"
WWDDK

SEQ ID NO: 1830 - protein, 10 aa, Artificial Sequence
  source: /note="Description of Artificial Sequence: Synthetic peptide"
SMITNWYFDV

SEQ ID NO: 1831 - protein, 286 aa, Artificial Sequence
  source: /note="Description of Artificial Sequence: Synthetic polypeptide"
QVTLRESGPALVKPTQTLTLTCTFSGFSLAPPRLICDSRVLERYLLEAKEAENITTGCAEHCSLNENITVPDTKVNFYAWKRMEVGQQAVEVWQGLALLSEAVLRGQALLVNSSQPWEPLQLHVDKAVSGLRSLTTLLRALGAQKEAISPPDAASAAPLRTITADTFRKLFRVYSNFLRGKLKLYTGEACRTGDRSTSGMSVGWIRQPPGKALEWLADIWWDDKKDYNPSLKSRLTISKDTSKNQVVLKVTNMDPADTATYYCARSMITNWYFDVWGAGTTVTVSS

SEQ ID NO: 1832 - protein, 616 aa, Artificial Sequence
  source: /note="Description of Artificial Sequence: Synthetic polypeptide"
QVTLRESGPALVKPTQTLTLTCTFSGFSLAPPRLICDSRVLERYLLEAKEAENITTGCAEHCSLNENITVPDTKVNFYAWKRMEVGQQAVEVWQGLALLSEAVLRGQALLVNSSQPWEPLQLHVDKAVSGLRSLTTLLRALGAQKEAISPPDAASAAPLRTITADTFRKLFRVYSNFLRGKLKLYTGEACRTGDRSTSGMSVGWIRQPPGKALEWLADIWWDDKKDYNPSLKSRLTISKDTSKNQVVLKVTNMDPADTATYYCARSMITNWYFDVWGAGTTVTVSSASTKGPSVFPLAPSSKSTSGGTAALGCLVKDYFPEPVTVSWNSGALTSGVHTFPAVLQSSGLYSLSSVVTVPSSSLGTQTYICNVNHKPSNTKVDKRVEPKSCDKTHTCPPCPAPELLGGPSVFLFPPKPKDTLMISRTPEVTCVVVAVSHEDPEVKFNWYVDGVEVHNAKTKPREEQYNSTYRVVSVLTVLHQDWLNGKEYKCKVSNKALAAPIEKTISKAKGQPREPQVYTLPPSREEMTKNQVSLTCLVKGFYPSDIAVEWESNGQPENNYKTTPPVLDSDGSFFLYSKLTVDKSRWQQGNVFSCSVMHEALHNHYTQKSLSLSPGK

SEQ ID NO: 1833 - protein, 10 aa, Artificial Sequence
  source: /note="Description of Artificial Sequence: Synthetic peptide"
KAQLSVGYMH

SEQ ID NO: 1834 - protein, 7 aa, Artificial Sequence
  source: /note="Description of Artificial Sequence: Synthetic peptide"
DTSKLAS

SEQ ID NO: 1835 - protein, 9 aa, Artificial Sequence
  source: /note="Description of Artificial Sequence: Synthetic peptide"
FQGSGYPFT

SEQ ID NO: 1836 - protein, 6 aa, Artificial Sequence
  source: /note="Description of Artificial Sequence: Synthetic peptide"
QLSVGY

SEQ ID NO: 1837 - protein, 3 aa, Artificial Sequence
  source: /note="Description of Artificial Sequence: Synthetic peptide"
DTS

SEQ ID NO: 1838 - protein, 6 aa, Artificial Sequence
  source: /note="Description of Artificial Sequence: Synthetic peptide"
GSGYPF

SEQ ID NO: 1839 - protein, 106 aa, Artificial Sequence; identical to SEQ ID NO: 15
  source: /note="Description of Artificial Sequence: Synthetic polypeptide"

SEQ ID NO: 1840 - protein, 213 aa, Artificial Sequence; identical to SEQ ID NO: 16
  source: /note="Description of Artificial Sequence: Synthetic polypeptide"

SEQ ID NO: 1841 - protein, 7 aa, Artificial Sequence
  source: /note="Description of Artificial Sequence: Synthetic peptide"
TSGMSVG

SEQ ID NO: 1842 - protein, 182 aa, Artificial Sequence
  source: /note="Description of Artificial Sequence: Synthetic polypeptide"
DIWWDAPPRLICDSRVLERYLLEAKEAENITTGCAEHCSLNENITVPDTKVNFYAWKRMEVGQQAVEVWQGLALLSEAVLRGQALLVNSSQPWEPLQLHVDKAVSGLRSLTTLLRALGAQKEAISPPDAASAAPLRTITADTFRKLFRVYSNFLRGKLKLYTGEACRTGDRDKKDYNPSLKS

SEQ ID NO: 1843 - protein, 10 aa, Artificial Sequence
  source: /note="Description of Artificial Sequence: Synthetic peptide"
SMITNWYFDV

SEQ ID NO: 1844 - protein, 9 aa, Artificial Sequence
  source: /note="Description of Artificial Sequence: Synthetic peptide"
GFSLSTSGM

SEQ ID NO: 1845 - protein, 171 aa, Artificial Sequence
  source: /note="Description of Artificial Sequence: Synthetic polypeptide"
WWDAPPRLICDSRVLERYLLEAKEAENITTGCAEHCSLNENITVPDTKVNFYAWKRMEVGQQAVEVWQGLALLSEAVLRGQALLVNSSQPWEPLQLHVDKAVSGLRSLTTLLRALGAQKEAISPPDAASAAPLRTITADTFRKLFRVYSNFLRGKLKLYTGEACRTGDRDK

SEQ ID NO: 1846 - protein, 10 aa, Artificial Sequence
  source: /note="Description of Artificial Sequence: Synthetic peptide"
SMITNWYFDV

SEQ ID NO: 1847 - protein, 286 aa, Artificial Sequence
  source: /note="Description of Artificial Sequence: Synthetic polypeptide"
QVTLRESGPALVKPTQTLTLTCTFSGFSLSTSGMSVGWIRQPPGKALEWLADIWWDAPPRLICDSRVLERYLLEAKEAENITTGCAEHCSLNENITVPDTKVNFYAWKRMEVGQQAVEVWQGLALLSEAVLRGQALLVNSSQPWEPLQLHVDKAVSGLRSLTTLLRALGAQKEAISPPDAASAAPLRTITADTFRKLFRVYSNFLRGKLKLYTGEACRTGDRDKKDYNPSLKSRLTISKDTSKNQVVLKVTNMDPADTATYYCARSMITNWYFDVWGAGTTVTVSS

SEQ ID NO: 1848 - protein, 616 aa, Artificial Sequence
  source: /note="Description of Artificial Sequence: Synthetic polypeptide"
QVTLRESGPALVKPTQTLTLTCTFSGFSLSTSGMSVGWIRQPPGKALEWLADIWWDAPPRLICDSRVLERYLLEAKEAENITTGCAEHCSLNENITVPDTKVNFYAWKRMEVGQQAVEVWQGLALLSEAVLRGQALLVNSSQPWEPLQLHVDKAVSGLRSLTTLLRALGAQKEAISPPDAASAAPLRTITADTFRKLFRVYSNFLRGKLKLYTGEACRTGDRDKKDYNPSLKSRLTISKDTSKNQVVLKVTNMDPADTATYYCARSMITNWYFDVWGAGTTVTVSSASTKGPSVFPLAPSSKSTSGGTAALGCLVKDYFPEPVTVSWNSGALTSGVHTFPAVLQSSGLYSLSSVVTVPSSSLGTQTYICNVNHKPSNTKVDKRVEPKSCDKTHTCPPCPAPELLGGPSVFLFPPKPKDTLMISRTPEVTCVVVAVSHEDPEVKFNWYVDGVEVHNAKTKPREEQYNSTYRVVSVLTVLHQDWLNGKEYKCKVSNKALAAPIEKTISKAKGQPREPQVYTLPPSREEMTKNQVSLTCLVKGFYPSDIAVEWESNGQPENNYKTTPPVLDSDGSFFLYSKLTVDKSRWQQGNVFSCSVMHEALHNHYTQKSLSLSPGK

SEQ ID NO: 1849 - protein, 10 aa, Artificial Sequence
  source: /note="Description of Artificial Sequence: Synthetic peptide"
KAQLSVGYMH

SEQ ID NO: 1850 - protein, 7 aa, Artificial Sequence
  source: /note="Description of Artificial Sequence: Synthetic peptide"
DTSKLAS

SEQ ID NO: 1851 - protein, 9 aa, Artificial Sequence
  source: /note="Description of Artificial Sequence: Synthetic peptide"
FQGSGYPFT

SEQ ID NO: 1852 - protein, 6 aa, Artificial Sequence
  source: /note="Description of Artificial Sequence: Synthetic peptide"
QLSVGY

SEQ ID NO: 1853 - protein, 3 aa, Artificial Sequence
  source: /note="Description of Artificial Sequence: Synthetic peptide"
DTS

SEQ ID NO: 1854 - protein, 6 aa, Artificial Sequence
  source: /note="Description of Artificial Sequence: Synthetic peptide"
GSGYPF

SEQ ID NO: 1855 - protein, 106 aa, Artificial Sequence; identical to SEQ ID NO: 15
  source: /note="Description of Artificial Sequence: Synthetic polypeptide"

SEQ ID NO: 1856 - protein, 213 aa, Artificial Sequence; identical to SEQ ID NO: 16
  source: /note="Description of Artificial Sequence: Synthetic polypeptide"

SEQ ID NO: 1857 - protein, 7 aa, Artificial Sequence
  source: /note="Description of Artificial Sequence: Synthetic peptide"
TSGMSVG

SEQ ID NO: 1858 - protein, 16 aa, Artificial Sequence
  source: /note="Description of Artificial Sequence: Synthetic peptide"
DIWWDDKKDYNPSLKS

SEQ ID NO: 1859 - protein, 176 aa, Artificial Sequence
  source: /note="Description of Artificial Sequence: Synthetic polypeptide"
SMITAPPRLICDSRVLERYLLEAKEAENITTGCAEHCSLNENITVPDTKVNFYAWKRMEVGQQAVEVWQGLALLSEAVLRGQALLVNSSQPWEPLQLHVDKAVSGLRSLTTLLRALGAQKEAISPPDAASAAPLRTITADTFRKLFRVYSNFLRGKLKLYTGEACRTGDRNWYFDV

SEQ ID NO: 1860 - protein, 9 aa, Artificial Sequence
  source: /note="Description of Artificial Sequence: Synthetic peptide"
GFSLSTSGM

SEQ ID NO: 1861 - protein, 5 aa, Artificial Sequence
  source: /note="Description of Artificial Sequence: Synthetic peptide"
WWDDK

SEQ ID NO: 1862 - protein, 176 aa, Artificial Sequence; identical to SEQ ID NO: 1859
  source: /note="Description of Artificial Sequence: Synthetic polypeptide"

SEQ ID NO: 1863 - protein, 286 aa, Artificial Sequence
  source: /note="Description of Artificial Sequence: Synthetic polypeptide"
QVTLRESGPALVKPTQTLTLTCTFSGFSLSTSGMSVGWIRQPPGKALEWLADIWWDDKKDYNPSLKSRLTISKDTSKNQVVLKVTNMDPADTATYYCARSMITAPPRLICDSRVLERYLLEAKEAENITTGCAEHCSLNENITVPDTKVNFYAWKRMEVGQQAVEVWQGLALLSEAVLRGQALLVNSSQPWEPLQLHVDKAVSGLRSLTTLLRALGAQKEAISPPDAASAAPLRTITADTFRKLFRVYSNFLRGKLKLYTGEACRTGDRNWYFDVWGAGTTVTVSS

SEQ ID NO: 1864 - protein, 616 aa, Artificial Sequence
  source: /note="Description of Artificial Sequence: Synthetic polypeptide"
QVTLRESGPALVKPTQTLTLTCTFSGFSLSTSGMSVGWIRQPPGKALEWLADIWWDDKKDYNPSLKSRLTISKDTSKNQVVLKVTNMDPADTATYYCARSMITAPPRLICDSRVLERYLLEAKEAENITTGCAEHCSLNENITVPDTKVNFYAWKRMEVGQQAVEVWQGLALLSEAVLRGQALLVNSSQPWEPLQLHVDKAVSGLRSLTTLLRALGAQKEAISPPDAASAAPLRTITADTFRKLFRVYSNFLRGKLKLYTGEACRTGDRNWYFDVWGAGTTVTVSSASTKGPSVFPLAPSSKSTSGGTAALGCLVKDYFPEPVTVSWNSGALTSGVHTFPAVLQSSGLYSLSSVVTVPSSSLGTQTYICNVNHKPSNTKVDKRVEPKSCDKTHTCPPCPAPELLGGPSVFLFPPKPKDTLMISRTPEVTCVVVAVSHEDPEVKFNWYVDGVEVHNAKTKPREEQYNSTYRVVSVLTVLHQDWLNGKEYKCKVSNKALAAPIEKTISKAKGQPREPQVYTLPPSREEMTKNQVSLTCLVKGFYPSDIAVEWESNGQPENNYKTTPPVLDSDGSFFLYSKLTVDKSRWQQGNVFSCSVMHEALHNHYTQKSLSLSPGK

SEQ ID NO: 1865 - protein, 10 aa, Artificial Sequence
  source: /note="Description of Artificial Sequence: Synthetic peptide"
KAQLSVGYMH

SEQ ID NO: 1866 - protein, 7 aa, Artificial Sequence
  source: /note="Description of Artificial Sequence: Synthetic peptide"
DTSKLAS

SEQ ID NO: 1867 - protein, 9 aa, Artificial Sequence
  source: /note="Description of Artificial Sequence: Synthetic peptide"
FQGSGYPFT

SEQ ID NO: 1868 - protein, 6 aa, Artificial Sequence
  source: /note="Description of Artificial Sequence: Synthetic peptide"
QLSVGY

SEQ ID NO: 1869 - protein, 3 aa, Artificial Sequence
  source: /note="Description of Artificial Sequence: Synthetic peptide"
DTS

SEQ ID NO: 1870 - protein, 6 aa, Artificial Sequence
  source: /note="Description of Artificial Sequence: Synthetic peptide"
GSGYPF

SEQ ID NO: 1871 - protein, 106 aa, Artificial Sequence; identical to SEQ ID NO: 15
  source: /note="Description of Artificial Sequence: Synthetic polypeptide"

SEQ ID NO: 1872 - protein, 213 aa, Artificial Sequence; identical to SEQ ID NO: 16
  source: /note="Description of Artificial Sequence: Synthetic polypeptide"

SEQ ID NO: 1873 - protein, 7 aa, Artificial Sequence
  source: /note="Description of Artificial Sequence: Synthetic peptide"
TSGMSVG

SEQ ID NO: 1874 - protein, 15 aa, Artificial Sequence
  source: /note="Description of Artificial Sequence: Synthetic peptide"
DIWWDDKKDYNPSLK

SEQ ID NO: 1875 - protein, 10 aa, Artificial Sequence
  source: /note="Description of Artificial Sequence: Synthetic peptide"
SMITNWYFDV

SEQ ID NO: 1876 - protein, 9 aa, Artificial Sequence
  source: /note="Description of Artificial Sequence: Synthetic peptide"
GFSLSTSGM

SEQ ID NO: 1877 - protein, 5 aa, Artificial Sequence
  source: /note="Description of Artificial Sequence: Synthetic peptide"
WWDDK

SEQ ID NO: 1878 - protein, 10 aa, Artificial Sequence
  source: /note="Description of Artificial Sequence: Synthetic peptide"
SMITNWYFDV

SEQ ID NO: 1879 - protein, 120 aa, Artificial Sequence; identical to SEQ ID NO: 55
  source: /note="Description of Artificial Sequence: Synthetic polypeptide"

SEQ ID NO: 1880 - protein, 450 aa, Artificial Sequence; identical to SEQ ID NO: 56
  source: /note="Description of Artificial Sequence: Synthetic polypeptide"

SEQ ID NO: 1881 - protein, 176 aa, Artificial Sequence
  source: /note="Description of Artificial Sequence: Synthetic polypeptide"
KAQLSAPPRLICDSRVLERYLLEAKEAENITTGCAEHCSLNENITVPDTKVNFYAWKRMEVGQQAVEVWQGLALLSEAVLRGQALLVNSSQPWEPLQLHVDKAVSGLRSLTTLLRALGAQKEAISPPDAASAAPLRTITADTFRKLFRVYSNFLRGKLKLYTGEACRTGDRVGYMH

SEQ ID NO: 1882 - protein, 7 aa, Artificial Sequence
  source: /note="Description of Artificial Sequence: Synthetic peptide"
DTSKLAS

SEQ ID NO: 1883 - protein, 9 aa, Artificial Sequence
  source: /note="Description of Artificial Sequence: Synthetic peptide"
FQGSGYPFT

SEQ ID NO: 1884 - protein, 172 aa, Artificial Sequence
  source: /note="Description of Artificial Sequence: Synthetic polypeptide"
QLSAPPRLICDSRVLERYLLEAKEAENITTGCAEHCSLNENITVPDTKVNFYAWKRMEVGQQAVEVWQGLALLSEAVLRGQALLVNSSQPWEPLQLHVDKAVSGLRSLTTLLRALGAQKEAISPPDAASAAPLRTITADTFRKLFRVYSNFLRGKLKLYTGEACRTGDRVGY

SEQ ID NO: 1885 - protein, 3 aa, Artificial Sequence
  source: /note="Description of Artificial Sequence: Synthetic peptide"
DTS

SEQ ID NO: 1886 - protein, 6 aa, Artificial Sequence
  source: /note="Description of Artificial Sequence: Synthetic peptide"
GSGYPF

SEQ ID NO: 1887 - protein, 272 aa, Artificial Sequence
  source: /note="Description of Artificial Sequence: Synthetic polypeptide"
DIQMTQSPSTLSASVGDRVTITCKAQLSAPPRLICDSRVLERYLLEAKEAENITTGCAEHCSLNENITVPDTKVNFYAWKRMEVGQQAVEVWQGLALLSEAVLRGQALLVNSSQPWEPLQLHVDKAVSGLRSLTTLLRALGAQKEAISPPDAASAAPLRTITADTFRKLFRVYSNFLRGKLKLYTGEACRTGDRVGYMHWYQQKPGKAPKLLIYDTSKLASGVPSRFSGSGSGTEFTLTISSLQPDDFATYYCFQGSGYPFTFGGGTKLEIK

SEQ ID NO: 1888 - protein, 379 aa, Artificial Sequence
  source: /note="Description of Artificial Sequence: Synthetic polypeptide"
DIQMTQSPSTLSASVGDRVTITCKAQLSAPPRLICDSRVLERYLLEAKEAENITTGCAEHCSLNENITVPDTKVNFYAWKRMEVGQQAVEVWQGLALLSEAVLRGQALLVNSSQPWEPLQLHVDKAVSGLRSLTTLLRALGAQKEAISPPDAASAAPLRTITADTFRKLFRVYSNFLRGKLKLYTGEACRTGDRVGYMHWYQQKPGKAPKLLIYDTSKLASGVPSRFSGSGSGTEFTLTISSLQPDDFATYYCFQGSGYPFTFGGGTKLEIKRTVAAPSVFIFPPSDEQLKSGTASVVCLLNNFYPREAKVQWKVDNALQSGNSQESVTEQDSKDSTYSLSSTLTLSKADYEKHKVYACEVTHQGLSSPVTKSFNRGEC

SEQ ID NO: 1889 - protein, 7 aa, Artificial Sequence
  source: /note="Description of Artificial Sequence: Synthetic peptide"
TSGMSVG

SEQ ID NO: 1890 - protein, 15 aa, Artificial Sequence
  source: /note="Description of Artificial Sequence: Synthetic peptide"
DIWWDDKKDYNPSLK

SEQ ID NO: 1891 - protein, 10 aa, Artificial Sequence
  source: /note="Description of Artificial Sequence: Synthetic peptide"
SMITNWYFDV

SEQ ID NO: 1892 - protein, 9 aa, Artificial Sequence
  source: /note="Description of Artificial Sequence: Synthetic peptide"
GFSLSTSGM

SEQ ID NO: 1893 - protein, 5 aa, Artificial Sequence
  source: /note="Description of Artificial Sequence: Synthetic peptide"
WWDDK

SEQ ID NO: 1894 - protein, 10 aa, Artificial Sequence
  source: /note="Description of Artificial Sequence: Synthetic peptide"
SMITNWYFDV

SEQ ID NO: 1895 - protein, 120 aa, Artificial Sequence; identical to SEQ ID NO: 55
  source: /note="Description of Artificial Sequence: Synthetic polypeptide"

SEQ ID NO: 1896 - protein, 450 aa, Artificial Sequence; identical to SEQ ID NO: 56
  source: /note="Description of Artificial Sequence: Synthetic polypeptide"

SEQ ID NO: 1897 - protein, 10 aa, Artificial Sequence
  source: /note="Description of Artificial Sequence: Synthetic peptide"
KAQLSVGYMH

SEQ ID NO: 1898 - protein, 173 aa, Artificial Sequence
  source: /note="Description of Artificial Sequence: Synthetic polypeptide"
DTAPPRLICDSRVLERYLLEAKEAENITTGCAEHCSLNENITVPDTKVNFYAWKRMEVGQQAVEVWQGLALLSEAVLRGQALLVNSSQPWEPLQLHVDKAVSGLRSLTTLLRALGAQKEAISPPDAASAAPLRTITADTFRKLFRVYSNFLRGKLKLYTGEACRTGDRSKLAS

SEQ ID NO: 1899 - protein, 9 aa, Artificial Sequence
  source: /note="Description of Artificial Sequence: Synthetic peptide"
FQGSGYPFT

SEQ ID NO: 1900 - protein, 6 aa, Artificial Sequence
  source: /note="Description of Artificial Sequence: Synthetic peptide"
QLSVGY

SEQ ID NO: 1901 - protein, 169 aa, Artificial Sequence
  source: /note="Description of Artificial Sequence: Synthetic polypeptide"
DTAPPRLICDSRVLERYLLEAKEAENITTGCAEHCSLNENITVPDTKVNFYAWKRMEVGQQAVEVWQGLALLSEAVLRGQALLVNSSQPWEPLQLHVDKAVSGLRSLTTLLRALGAQKEAISPPDAASAAPLRTITADTFRKLFRVYSNFLRGKLKLYTGEACRTGDRS

SEQ ID NO: 1902 - protein, 6 aa, Artificial Sequence
  source: /note="Description of Artificial Sequence: Synthetic peptide"
GSGYPF

SEQ ID NO: 1903 - protein, 272 aa, Artificial Sequence
  source: /note="Description of Artificial Sequence: Synthetic polypeptide"
DIQMTQSPSTLSASVGDRVTITCKAQLSVGYMHWYQQKPGKAPKLLIYDTAPPRLICDSRVLERYLLEAKEAENITTGCAEHCSLNENITVPDTKVNFYAWKRMEVGQQAVEVWQGLALLSEAVLRGQALLVNSSQPWEPLQLHVDKAVSGLRSLTTLLRALGAQKEAISPPDAASAAPLRTITADTFRKLFRVYSNFLRGKLKLYTGEACRTGDRSKLASGVPSRFSGSGSGTEFTLTISSLQPDDFATYYCFQGSGYPFTFGGGTKLEIK

SEQ ID NO: 1904 - protein, 379 aa, Artificial Sequence
  source: /note="Description of Artificial Sequence: Synthetic polypeptide"
DIQMTQSPSTLSASVGDRVTITCKAQLSVGYMHWYQQKPGKAPKLLIYDTAPPRLICDSRVLERYLLEAKEAENITTGCAEHCSLNENITVPDTKVNFYAWKRMEVGQQAVEVWQGLALLSEAVLRGQALLVNSSQPWEPLQLHVDKAVSGLRSLTTLLRALGAQKEAISPPDAASAAPLRTITADTFRKLFRVYSNFLRGKLKLYTGEACRTGDRSKLASGVPSRFSGSGSGTEFTLTISSLQPDDFATYYCFQGSGYPFTFGGGTKLEIKRTVAAPSVFIFPPSDEQLKSGTASVVCLLNNFYPREAKVQWKVDNALQSGNSQESVTEQDSKDSTYSLSSTLTLSKADYEKHKVYACEVTHQGLSSPVTKSFNRGEC

SEQ ID NO: 1905 - protein, 7 aa, Artificial Sequence
  source: /note="Description of Artificial Sequence: Synthetic peptide"
TSGMSVG

SEQ ID NO: 1906 - protein, 15 aa, Artificial Sequence
  source: /note="Description of Artificial Sequence: Synthetic peptide"
DIWWDDKKDYNPSLK

SEQ ID NO: 1907 - protein, 10 aa, Artificial Sequence
  source: /note="Description of Artificial Sequence: Synthetic peptide"
SMITNWYFDV

SEQ ID NO: 1908 - protein, 9 aa, Artificial Sequence
  source: /note="Description of Artificial Sequence: Synthetic peptide"
GFSLSTSGM

SEQ ID NO: 1909 - protein, 5 aa, Artificial Sequence
  source: /note="Description of Artificial Sequence: Synthetic peptide"
WWDDK

SEQ ID NO: 1910 - protein, 10 aa, Artificial Sequence
  source: /note="Description of Artificial Sequence: Synthetic peptide"
SMITNWYFDV

SEQ ID NO: 1911 - protein, 120 aa, Artificial Sequence; identical to SEQ ID NO: 55
  source: /note="Description of Artificial Sequence: Synthetic polypeptide"

SEQ ID NO: 1912 - protein, 450 aa, Artificial Sequence; identical to SEQ ID NO: 56
  source: /note="Description of Artificial Sequence: Synthetic polypeptide"

SEQ ID NO: 1913 - protein, 10 aa, Artificial Sequence
  source: /note="Description of Artificial Sequence: Synthetic peptide"
KAQLSVGYMH

SEQ ID NO: 1914 - protein, 7 aa, Artificial Sequence
  source: /note="Description of Artificial Sequence: Synthetic peptide"
DTSKLAS

SEQ ID NO: 1915 - protein, 175 aa, Artificial Sequence
  source: /note="Description of Artificial Sequence: Synthetic polypeptide"
FQGSGAPPRLICDSRVLERYLLEAKEAENITTGCAEHCSLNENITVPDTKVNFYAWKRMEVGQQAVEVWQGLALLSEAVLRGQALLVNSSQPWEPLQLHVDKAVSGLRSLTTLLRALGAQKEAISPPDAASAAPLRTITADTFRKLFRVYSNFLRGKLKLYTGEACRTGDRYPFT

SEQ ID NO: 1916 - protein, 6 aa, Artificial Sequence
  source: /note="Description of Artificial Sequence: Synthetic peptide"
QLSVGY

SEQ ID NO: 1917 - protein, 3 aa, Artificial Sequence
  source: /note="Description of Artificial Sequence: Synthetic peptide"
DTS

SEQ ID NO: 1918 - protein, 172 aa, Artificial Sequence
  source: /note="Description of Artificial Sequence: Synthetic polypeptide"
GSGAPPRLICDSRVLERYLLEAKEAENITTGCAEHCSLNENITVPDTKVNFYAWKRMEVGQQAVEVWQGLALLSEAVLRGQALLVNSSQPWEPLQLHVDKAVSGLRSLTTLLRALGAQKEAISPPDAASAAPLRTITADTFRKLFRVYSNFLRGKLKLYTGEACRTGDRYPF

SEQ ID NO: 1919 - protein, 272 aa, Artificial Sequence
  source: /note="Description of Artificial Sequence: Synthetic polypeptide"
DIQMTQSPSTLSASVGDRVTITCKAQLSVGYMHWYQQKPGKAPKLLIYDTSKLASGVPSRFSGSGSGTEFTLTISSLQPDDFATYYCFQGSGAPPRLICDSRVLERYLLEAKEAENITTGCAEHCSLNENITVPDTKVNFYAWKRMEVGQQAVEVWQGLALLSEAVLRGQALLVNSSQPWEPLQLHVDKAVSGLRSLTTLLRALGAQKEAISPPDAASAAPLRTITADTFRKLFRVYSNFLRGKLKLYTGEACRTGDRYPFTFGGGTKLEIK

SEQ ID NO: 1920 - protein, 379 aa, Artificial Sequence
  source: /note="Description of Artificial Sequence: Synthetic polypeptide"
DIQMTQSPSTLSASVGDRVTITCKAQLSVGYMHWYQQKPGKAPKLLIYDTSKLASGVPSRFSGSGSGTEFTLTISSLQPDDFATYYCFQGSGAPPRLICDSRVLERYLLEAKEAENITTGCAEHCSLNENITVPDTKVNFYAWKRMEVGQQAVEVWQGLALLSEAVLRGQALLVNSSQPWEPLQLHVDKAVSGLRSLTTLLRALGAQKEAISPPDAASAAPLRTITADTFRKLFRVYSNFLRGKLKLYTGEACRTGDRYPFTFGGGTKLEIKRTVAAPSVFIFPPSDEQLKSGTASVVCLLNNFYPREAKVQWKVDNALQSGNSQESVTEQDSKDSTYSLSSTLTLSKADYEKHKVYACEVTHQGLSSPVTKSFNRGEC

SEQ ID NO: 1921 - protein, 340 aa, Artificial Sequence
  source: /note="Description of Artificial Sequence: Synthetic polypeptide"
SPAPPACDLRVLSKLLRDSHVLHSRLSQCPEVHPLPTPVLLPAVDFSLGEWKTQMEETKAQDILGAVTLLLEGVMAARGQLGPTCLSSLLGQLSGQVRLLLGALQSLLGTQLPPQGRTTAHKDPNAIFLSFQHLLRGKVRFLMLVGGSTLCVRRAPPTTAVPSRTSLVLTLNELPNRTSGLLETNFTASARTTGSGLLKWQQGFRAKIPGLLNQTSRSLDQIPGYLNRIHELLNGTRGLFPGPSRRTLGAPDISSGTSDTGSLPPNLQPGYSPSPTHPPTGQYTLFPLPPTLPTPVVQLHPLLPDPSAPTPTPTSPLLNTSYTHSQNLSQEGSTSGMSVG

SEQ ID NO: 1922 - protein, 15 aa, Artificial Sequence
  source: /note="Description of Artificial Sequence: Synthetic peptide"
DIWWDDKKDYNPSLK

SEQ ID NO: 1923 - protein, 10 aa, Artificial Sequence
  source: /note="Description of Artificial Sequence: Synthetic peptide"
SMITNWYFDV

SEQ ID NO: 1924 - protein, 341 aa, Artificial Sequence
  source: /note="Description of Artificial Sequence: Synthetic polypeptide"
GFSLSPAPPACDLRVLSKLLRDSHVLHSRLSQCPEVHPLPTPVLLPAVDFSLGEWKTQMEETKAQDILGAVTLLLEGVMAARGQLGPTCLSSLLGQLSGQVRLLLGALQSLLGTQLPPQGRTTAHKDPNAIFLSFQHLLRGKVRFLMLVGGSTLCVRRAPPTTAVPSRTSLVLTLNELPNRTSGLLETNFTASARTTGSGLLKWQQGFRAKIPGLLNQTSRSLDQIPGYLNRIHELLNGTRGLFPGPSRRTLGAPDISSGTSDTGSLPPNLQPGYSPSPTHPPTGQYTLFPLPPTLPTPVVQLHPLLPDPSAPTPTPTSPLLNTSYTHSQNLSQEGSTSGM

SEQ ID NO: 1925 - protein, 5 aa, Artificial Sequence
  source: /note="Description of Artificial Sequence: Synthetic peptide"
WWDDK

SEQ ID NO: 1926 - protein, 10 aa, Artificial Sequence
  source: /note="Description of Artificial Sequence: Synthetic peptide"
SMITNWYFDV

SEQ ID NO: 1927 - protein, 452 aa, Artificial Sequence
  source: /note="Description of Artificial Sequence: Synthetic polypeptide"
QVTLRESGPALVKPTQTLTLTCTFSGFSLSPAPPACDLRVLSKLLRDSHVLHSRLSQCPEVHPLPTPVLLPAVDFSLGEWKTQMEETKAQDILGAVTLLLEGVMAARGQLGPTCLSSLLGQLSGQVRLLLGALQSLLGTQLPPQGRTTAHKDPNAIFLSFQHLLRGKVRFLMLVGGSTLCVRRAPPTTAVPSRTSLVLTLNELPNRTSGLLETNFTASARTTGSGLLKWQQGFRAKIPGLLNQTSRSLDQIPGYLNRIHELLNGTRGLFPGPSRRTLGAPDISSGTSDTGSLPPNLQPGYSPSPTHPPTGQYTLFPLPPTLPTPVVQLHPLLPDPSAPTPTPTSPLLNTSYTHSQNLSQEGSTSGMSVGWIRQPPGKALEWLADIWWDDKKDYNPSLKSRLTISKDTSKNQVVLKVTNMDPADTATYYCARSMITNWYFDVWGAGTTVTVSS

SEQ ID NO: 1928 - protein, 782 aa, Artificial Sequence
  source: /note="Description of Artificial Sequence: Synthetic polypeptide"
QVTLRESGPALVKPTQTLTLTCTFSGFSLSPAPPACDLRVLSKLLRDSHVLHSRLSQCPEVHPLPTPVLLPAVDFSLGEWKTQMEETKAQDILGAVTLLLEGVMAARGQLGPTCLSSLLGQLSGQVRLLLGALQSLLGTQLPPQGRTTAHKDPNAIFLSFQHLLRGKVRFLMLVGGSTLCVRRAPPTTAVPSRTSLVLTLNELPNRTSGLLETNFTASARTTGSGLLKWQQGFRAKIPGLLNQTSRSLDQIPGYLNRIHELLNGTRGLFPGPSRRTLGAPDISSGTSDTGSLPPNLQPGYSPSPTHPPTGQYTLFPLPPTLPTPVVQLHPLLPDPSAPTPTPTSPLLNTSYTHSQNLSQEGSTSGMSVGWIRQPPGKALEWLADIWWDDKKDYNPSLKSRLTISKDTSKNQVVLKVTNMDPADTATYYCARSMITNWYFDVWGAGTTVTVSSASTKGPSVFPLAPSSKSTSGGTAALGCLVKDYFPEPVTVSWNSGALTSGVHTFPAVLQSSGLYSLSSVVTVPSSSLGTQTYICNVNHKPSNTKVDKRVEPKSCDKTHTCPPCPAPELLGGPSVFLFPPKPKDTLMISRTPEVTCVVVAVSHEDPEVKFNWYVDGVEVHNAKTKPREEQYNSTYRVVSVLTVLHQDWLNGKEYKCKVSNKALAAPIEKTISKAKGQPREPQVYTLPPSREEMTKNQVSLTCLVKGFYPSDIAVEWESNGQPENNYKTTPPVLDSDGSFFLYSKLTVDKSRWQQGNVFSCSVMHEALHNHYTQKSLSLSPGK

SEQ ID NO: 1929 - protein, 10 aa, Artificial Sequence
  source: /note="Description of Artificial Sequence: Synthetic peptide"
KAQLSVGYMH

SEQ ID NO: 1930 - protein, 7 aa, Artificial Sequence
  source: /note="Description of Artificial Sequence: Synthetic peptide"
DTSKLAS

SEQ ID NO: 1931 - protein, 9 aa, Artificial Sequence
  source: /note="Description of Artificial Sequence: Synthetic peptide"
FQGSGYPFT

SEQ ID NO: 1932 - protein, 6 aa, Artificial Sequence
  source: /note="Description of Artificial Sequence: Synthetic peptide"
QLSVGY

SEQ ID NO: 1933 - protein, 3 aa, Artificial Sequence
  source: /note="Description of Artificial Sequence: Synthetic peptide"
DTS

SEQ ID NO: 1934 - protein, 6 aa, Artificial Sequence
  source: /note="Description of Artificial Sequence: Synthetic peptide"
GSGYPF

SEQ ID NO: 1935 - protein, 106 aa, Artificial Sequence; identical to SEQ ID NO: 15
  source: /note="Description of Artificial Sequence: Synthetic polypeptide"

SEQ ID NO: 1936 - protein, 213 aa, Artificial Sequence; identical to SEQ ID NO: 16
  source: /note="Description of Artificial Sequence: Synthetic polypeptide"

SEQ ID NO: 1937 - protein, 7 aa, Artificial Sequence
  source: /note="Description of Artificial Sequence: Synthetic peptide"
TSGMSVG

SEQ ID NO: 1938 - protein, 347 aa, Artificial Sequence
  source: /note="Description of Artificial Sequence: Synthetic polypeptide"
DIWWDSPAPPACDLRVLSKLLRDSHVLHSRLSQCPEVHPLPTPVLLPAVDFSLGEWKTQMEETKAQDILGAVTLLLEGVMAARGQLGPTCLSSLLGQLSGQVRLLLGALQSLLGTQLPPQGRTTAHKDPNAIFLSFQHLLRGKVRFLMLVGGSTLCVRRAPPTTAVPSRTSLVLTLNELPNRTSGLLETNFTASARTTGSGLLKWQQGFRAKIPGLLNQTSRSLDQIPGYLNRIHELLNGTRGLFPGPSRRTLGAPDISSGTSDTGSLPPNLQPGYSPSPTHPPTGQYTLFPLPPTLPTPVVQLHPLLPDPSAPTPTPTSPLLNTSYTHSQNLSQEGDKKDYNPSLK

SEQ ID NO: 1939 - protein, 10 aa, Artificial Sequence
  source: /note="Description of Artificial Sequence: Synthetic peptide"
SMITNWYFDV

SEQ ID NO: 1940 - protein, 9 aa, Artificial Sequence
  source: /note="Description of Artificial Sequence: Synthetic peptide"
GFSLSTSGM

SEQ ID NO: 1941 - protein, 337 aa, Artificial Sequence
  source: /note="Description of Artificial Sequence: Synthetic polypeptide"
WWDSPAPPACDLRVLSKLLRDSHVLHSRLSQCPEVHPLPTPVLLPAVDFSLGEWKTQMEETKAQDILGAVTLLLEGVMAARGQLGPTCLSSLLGQLSGQVRLLLGALQSLLGTQLPPQGRTTAHKDPNAIFLSFQHLLRGKVRFLMLVGGSTLCVRRAPPTTAVPSRTSLVLTLNELPNRTSGLLETNFTASARTTGSGLLKWQQGFRAKIPGLLNQTSRSLDQIPGYLNRIHELLNGTRGLFPGPSRRTLGAPDISSGTSDTGSLPPNLQPGYSPSPTHPPTGQYTLFPLPPTLPTPVVQLHPLLPDPSAPTPTPTSPLLNTSYTHSQNLSQEGDK

SEQ ID NO: 1942 - protein, 10 aa, Artificial Sequence
  source: /note="Description of Artificial Sequence: Synthetic peptide"
SMITNWYFDV

SEQ ID NO: 1943 - protein, 452 aa, Artificial Sequence
  source: /note="Description of Artificial Sequence: Synthetic polypeptide"
QVTLRESGPALVKPTQTLTLTCTFSGFSLSTSGMSVGWIRQPPGKALEWLADIWWDSPAPPACDLRVLSKLLRDSHVLHSRLSQCPEVHPLPTPVLLPAVDFSLGEWKTQMEETKAQDILGAVTLLLEGVMAARGQLGPTCLSSLLGQLSGQVRLLLGALQSLLGTQLPPQGRTTAHKDPNAIFLSFQHLLRGKVRFLMLVGGSTLCVRRAPPTTAVPSRTSLVLTLNELPNRTSGLLETNFTASARTTGSGLLKWQQGFRAKIPGLLNQTSRSLDQIPGYLNRIHELLNGTRGLFPGPSRRTLGAPDISSGTSDTGSLPPNLQPGYSPSPTHPPTGQYTLFPLPPTLPTPVVQLHPLLPDPSAPTPTPTSPLLNTSYTHSQNLSQEGDKKDYNPSLKSRLTISKDTSKNQVVLKVTNMDPADTATYYCARSMITNWYFDVWGAGTTVTVSS

SEQ ID NO: 1944 - protein, 782 aa, Artificial Sequence
  source: /note="Description of Artificial Sequence: Synthetic polypeptide"
QVTLRESGPALVKPTQTLTLTCTFSGFSLSTSGMSVGWIRQPPGKALEWLADIWWDSPAPPACDLRVLSKLLRDSHVLHSRLSQCPEVHPLPTPVLLPAVDFSLGEWKTQMEETKAQDILGAVTLLLEGVMAARGQLGPTCLSSLLGQLSGQVRLLLGALQSLLGTQLPPQGRTTAHKDPNAIFLSFQHLLRGKVRFLMLVGGSTLCVRRAPPTTAVPSRTSLVLTLNELPNRTSGLLETNFTASARTTGSGLLKWQQGFRAKIPGLLNQTSRSLDQIPGYLNRIHELLNGTRGLFPGPSRRTLGAPDISSGTSDTGSLPPNLQPGYSPSPTHPPTGQYTLFPLPPTLPTPVVQLHPLLPDPSAPTPTPTSPLLNTSYTHSQNLSQEGDKKDYNPSLKSRLTISKDTSKNQVVLKVTNMDPADTATYYCARSMITNWYFDVWGAGTTVTVSSASTKGPSVFPLAPSSKSTSGGTAALGCLVKDYFPEPVTVSWNSGALTSGVHTFPAVLQSSGLYSLSSVVTVPSSSLGTQTYICNVNHKPSNTKVDKRVEPKSCDKTHTCPPCPAPELLGGPSVFLFPPKPKDTLMISRTPEVTCVVVAVSHEDPEVKFNWYVDGVEVHNAKTKPREEQYNSTYRVVSVLTVLHQDWLNGKEYKCKVSNKALAAPIEKTISKAKGQPREPQVYTLPPSREEMTKNQVSLTCLVKGFYPSDIAVEWESNGQPENNYKTTPPVLDSDGSFFLYSKLTVDKSRWQQGNVFSCSVMHEALHNHYTQKSLSLSPGK

SEQ ID NO: 1945 - protein, 10 aa, Artificial Sequence
  source: /note="Description of Artificial Sequence: Synthetic peptide"
KAQLSVGYMH

SEQ ID NO: 1946 - protein, 7 aa, Artificial Sequence
  source: /note="Description of Artificial Sequence: Synthetic peptide"
DTSKLAS

SEQ ID NO: 1947 - protein, 9 aa, Artificial Sequence
  source: /note="Description of Artificial Sequence: Synthetic peptide"
FQGSGYPFT

SEQ ID NO: 1948 - protein, 6 aa, Artificial Sequence
  source: /note="Description of Artificial Sequence: Synthetic peptide"
QLSVGY

SEQ ID NO: 1949 - protein, 3 aa, Artificial Sequence
  source: /note="Description of Artificial Sequence: Synthetic peptide"
DTS

SEQ ID NO: 1950 - protein, 6 aa, Artificial Sequence
  source: /note="Description of Artificial Sequence: Synthetic peptide"
GSGYPF

SEQ ID NO: 1951 - protein, 106 aa, Artificial Sequence; identical to SEQ ID NO: 15
  source: /note="Description of Artificial Sequence: Synthetic polypeptide"

SEQ ID NO: 1952 - protein, 213 aa, Artificial Sequence; identical to SEQ ID NO: 16
  source: /note="Description of Artificial Sequence: Synthetic polypeptide"

SEQ ID NO: 1953 - protein, 7 aa, Artificial Sequence
  source: /note="Description of Artificial Sequence: Synthetic peptide"
TSGMSVG

SEQ ID NO: 1954 - protein, 15 aa, Artificial Sequence
  source: /note="Description of Artificial Sequence: Synthetic peptide"
DIWWDDKKDYNPSLK

SEQ ID NO: 1955 - protein, 342 aa, Artificial Sequence
  source: /note="Description of Artificial Sequence: Synthetic polypeptide"
SMITSPAPPACDLRVLSKLLRDSHVLHSRLSQCPEVHPLPTPVLLPAVDFSLGEWKTQMEETKAQDILGAVTLLLEGVMAARGQLGPTCLSSLLGQLSGQVRLLLGALQSLLGTQLPPQGRTTAHKDPNAIFLSFQHLLRGKVRFLMLVGGSTLCVRRAPPTTAVPSRTSLVLTLNELPNRTSGLLETNFTASARTTGSGLLKWQQGFRAKIPGLLNQTSRSLDQIPGYLNRIHELLNGTRGLFPGPSRRTLGAPDISSGTSDTGSLPPNLQPGYSPSPTHPPTGQYTLFPLPPTLPTPVVQLHPLLPDPSAPTPTPTSPLLNTSYTHSQNLSQEGNWYFDV

SEQ ID NO: 1956 - protein, 9 aa, Artificial Sequence
  source: /note="Description of Artificial Sequence: Synthetic peptide"
GFSLSTSGM

SEQ ID NO: 1957 - protein, 5 aa, Artificial Sequence
  source: /note="Description of Artificial Sequence: Synthetic peptide"
WWDDK

SEQ ID NO: 1958 - protein, 342 aa, Artificial Sequence; identical to SEQ ID NO: 1955
  source: /note="Description of Artificial Sequence: Synthetic polypeptide"

SEQ ID NO: 1959 - protein, 452 aa, Artificial Sequence
  source: /note="Description of Artificial Sequence: Synthetic polypeptide"
QVTLRESGPALVKPTQTLTLTCTFSGFSLSTSGMSVGWIRQPPGKALEWLADIWWDDKKDYNPSLKSRLTISKDTSANQVVLKVTNMDPADTATYYCARSMITSPAPPACDLRVLSKLLRDSHVLHSRLSQCPEVHPLPTPVLLPAVDFSLGEWKTQMEETKAQDILGAVTLLLEGVMAARGQLGPTCLSSLLGQLSGQVRLLLGALQSLLGTQLPPQGRTTAHKDPNAIFLSFQHLLRGKVRFLMLVGGSTLCVRRAPPTTAVPSRTSLVLTLNELPNRTSGLLETNFTASARTTGSGLLKWQQGFRAKIPGLLNQTSRSLDQIPGYLNRIHELLNGTRGLFPGPSRRTLGAPDISSGTSDTGSLPPNLQPGYSPSPTHPPTGQYTLFPLPPTLPTPVVQLHPLLPDPSAPTPTPTSPLLNTSYTHSQNLSQEGNWYFDVWGAGTTVTVSS

SEQ ID NO: 1960 - protein, 782 aa, Artificial Sequence
  source: /note="Description of Artificial Sequence: Synthetic polypeptide"
QVTLRESGPALVKPTQTLTLTCTFSGFSLSTSGMSVGWIRQPPGKALEWLADIWWDDKKDYNPSLKSRLTISKDTSANQVVLKVTNMDPADTATYYCARSMITSPAPPACDLRVLSKLLRDSHVLHSRLSQCPEVHPLPTPVLLPAVDFSLGEWKTQMEETKAQDILGAVTLLLEGVMAARGQLGPTCLSSLLGQLSGQVRLLLGALQSLLGTQLPPQGRTTAHKDPNAIFLSFQHLLRGKVRFLMLVGGSTLCVRRAPPTTAVPSRTSLVLTLNELPNRTSGLLETNFTASARTTGSGLLKWQQGFRAKIPGLLNQTSRSLDQIPGYLNRIHELLNGTRGLFPGPSRRTLGAPDISSGTSDTGSLPPNLQPGYSPSPTHPPTGQYTLFPLPPTLPTPVVQLHPLLPDPSAPTPTPTSPLLNTSYTHSQNLSQEGNWYFDVWGAGTTVTVSSASTKGPSVFPLAPSSKSTSGGTAALGCLVKDYFPEPVTVSWNSGALTSGVHTFPAVLQSSGLYSLSSVVTVPSSSLGTQTYICNVNHKPSNTKVDKRVEPKSCDKTHTCPPCPAPELLGGPSVFLFPPKPKDTLMISRTPEVTCVVVAVSHEDPEVKFNWYVDGVEVHNAKTKPREEQYNSTYRVVSVLTVLHQDWLNGKEYKCKVSNKALAAPIEKTISKAKGQPREPQVYTLPPSREEMTKNQVSLTCLVKGFYPSDIAVEWESNGQPENNYKTTPPVLDSDGSFFLYSKLTVDKSRWQQGNVFSCSVMHEALHNHYTQKSLSLSPGK

SEQ ID NO: 1961 - protein, 10 aa, Artificial Sequence
  source: /note="Description of Artificial Sequence: Synthetic peptide"
KAQLSVGYMH

SEQ ID NO: 1962 - protein, 7 aa, Artificial Sequence
  source: /note="Description of Artificial Sequence: Synthetic peptide"
DTSKLAS

SEQ ID NO: 1963 - protein, 9 aa, Artificial Sequence
  source: /note="Description of Artificial Sequence: Synthetic peptide"
FQGSGYPFT

SEQ ID NO: 1964 - protein, 6 aa, Artificial Sequence
  source: /note="Description of Artificial Sequence: Synthetic peptide"
QLSVGY

SEQ ID NO: 1965 - protein, 3 aa, Artificial Sequence
  source: /note="Description of Artificial Sequence: Synthetic peptide"
DTS

SEQ ID NO: 1966 - protein, 6 aa, Artificial Sequence
  source: /note="Description of Artificial Sequence: Synthetic peptide"
GSGYPF

SEQ ID NO: 1967 - protein, 106 aa, Artificial Sequence; identical to SEQ ID NO: 15
  source: /note="Description of Artificial Sequence: Synthetic polypeptide"

SEQ ID NO: 1968 - protein, 213 aa, Artificial Sequence; identical to SEQ ID NO: 16
  source: /note="Description of Artificial Sequence: Synthetic polypeptide"

SEQ ID NO: 1969 - protein, 7 aa, Artificial Sequence
  source: /note="Description of Artificial Sequence: Synthetic peptide"
TSGMSVG

SEQ ID NO: 1970 - protein, 15 aa, Artificial Sequence
  source: /note="Description of Artificial Sequence: Synthetic peptide"
DIWWDDKKDYNPSLK

SEQ ID NO: 1971 - protein, 10 aa, Artificial Sequence
  source: /note="Description of Artificial Sequence: Synthetic peptide"
SMITNWYFDV

SEQ ID NO: 1972 - protein, 9 aa, Artificial Sequence
  source: /note="Description of Artificial Sequence: Synthetic peptide"
GFSLSTSGM

SEQ ID NO: 1973 - protein, 5 aa, Artificial Sequence
  source: /note="Description of Artificial Sequence: Synthetic peptide"
WWDDK

SEQ ID NO: 1974 - protein, 10 aa, Artificial Sequence
  source: /note="Description of Artificial Sequence: Synthetic peptide"
SMITNWYFDV

SEQ ID NO: 1975 - protein, 120 aa, Artificial Sequence; identical to SEQ ID NO: 55
  source: /note="Description of Artificial Sequence: Synthetic polypeptide"

SEQ ID NO: 1976 - protein, 450 aa, Artificial Sequence; identical to SEQ ID NO: 56
  source: /note="Description of Artificial Sequence: Synthetic polypeptide"

SEQ ID NO: 1977 - protein, 342 aa, Artificial Sequence
  source: /note="Description of Artificial Sequence: Synthetic polypeptide"
KAQLSSPAPPACDLRVLSKLLRDSHVLHSRLSQCPEVHPLPTPVLLPAVDFSLGEWKTQMEETKAQDILGAVTLLLEGVMAARGQLGPTCLSSLLGQLSGQVRLLLGALQSLLGTQLPPQGRTTAHKDPNAIFLSFQHLLRGKVRFLMLVGGSTLCVRRAPPTTAVPSRTSLVLTLNELPNRTSGLLETNFTASARTTGSGLLKWQQGFRAKIPGLLNQTSRSLDQIPGYLNRIHELLNGTRGLFPGPSRRTLGAPDISSGTSDTGSLPPNLQPGYSPSPTHPPTGQYTLFPLPPTLPTPVVQLHPLLPDPSAPTPTPTSPLLNTSYTHSQNLSQEGVGYMH

SEQ ID NO: 1978 - protein, 7 aa, Artificial Sequence
  source: /note="Description of Artificial Sequence: Synthetic peptide"
DTSKLAS

SEQ ID NO: 1979 - protein, 9 aa, Artificial Sequence
  source: /note="Description of Artificial Sequence: Synthetic peptide"
FQGSGYPFT

SEQ ID NO: 1980 - protein, 338 aa, Artificial Sequence
  source: /note="Description of Artificial Sequence: Synthetic polypeptide"
QLSSPAPPACDLRVLSKLLRDSHVLHSRLSQCPEVHPLPTPVLLPAVDFSLGEWKTQMEETKAQDILGAVTLLLEGVMAARGQLGPTCLSSLLGQLSGQVRLLLGALQSLLGTQLPPQGRTTAHKDPNAIFLSFQHLLRGKVRFLMLVGGSTLCVRRAPPTTAVPSRTSLVLTLNELPNRTSGLLETNFTASARTTGSGLLKWQQGFRAKIPGLLNQTSRSLDQIPGYLNRIHELLNGTRGLFPGPSRRTLGAPDISSGTSDTGSLPPNLQPGYSPSPTHPPTGQYTLFPLPPTLPTPVVQLHPLLPDPSAPTPTPTSPLLNTSYTHSQNLSQEGVGY

SEQ ID NO: 1981 - protein, 3 aa, Artificial Sequence
  source: /note="Description of Artificial Sequence: Synthetic peptide"
DTS

SEQ ID NO: 1982 - protein, 6 aa, Artificial Sequence
  source: /note="Description of Artificial Sequence: Synthetic peptide"
GSGYPF

SEQ ID NO: 1983 - protein, 438 aa, Artificial Sequence
  source: /note="Description of Artificial Sequence: Synthetic polypeptide"
DIQMTQSPSTLSASVGDRVTITCKAQLSSPAPPACDLRVLSKLLRDSHVLHSRLSQCPEVHPLPTPVLLPAVDFSLGEWKTQMEETKAQDILGAVTLLLEGVMAARGQLGPTCLSSLLGQLSGQVRLLLGALQSLLGTQLPPQGRTTAHKDPNAIFLSFQHLLRGKVRFLMLVGGSTLCVRRAPPTTAVPSRTSLVLTLNELPNRTSGLLETNFTASARTTGSGLLKWQQGFRAKIPGLLNQTSRSLDQIPGYLNRIHELLNGTRGLFPGPSRRTLGAPDISSGTSDTGSLPPNLQPGYSPSPTHPPTGQYTLFPLPPTLPTPVVQLHPLLPDPSAPTPTPTSPLLNTSYTHSQNLSQEGVGYMHWYQQKPGKAPKLLIYDTSKLASGVPSRFSGSGSGTEFTLTISSLQPDDFATYYCFQGSGYPFTFGGGTKLEIK

SEQ ID NO: 1984 - protein, 545 aa, Artificial Sequence
  source: /note="Description of Artificial Sequence: Synthetic polypeptide"
DIQMTQSPSTLSASVGDRVTITCKAQLSSPAPPACDLRVLSKLLRDSHVLHSRLSQCPEVHPLPTPVLLPAVDFSLGEWKTQMEETKAQDILGAVTLLLEGVMAARGQLGPTCLSSLLGQLSGQVRLLLGALQSLLGTQLPPQGRTTAHKDPNAIFLSFQHLLRGKVRFLMLVGGSTLCVRRAPPTTAVPSRTSLVLTLNELPNRTSGLLETNFTASARTTGSGLLKWQQGFRAKIPGLLNQTSRSLDQIPGYLNRIHELLNGTRGLFPGPSRRTLGAPDISSGTSDTGSLPPNLQPGYSPSPTHPPTGQYTLFPLPPTLPTPVVQLHPLLPDPSAPTPTPTSPLLNTSYTHSQNLSQEGVGYMHWYQQKPGKAPKLLIYDTSKLASGVPSRFSGSGSGTEFTLTISSLQPDDFATYYCFQGSGYPFTFGGGTKLEIKRTVAAPSVFIFPPSDEQLKSGTASVVCLLNNFYPREAKVQWKVDNALQSGNSQESVTEQDSKDSTYSLSSTLTLSKADYEKHKVYACEVTHQGLSSPVTKSFNRGEC

SEQ ID NO: 1985 - protein, 7 aa, Artificial Sequence
  source: /note="Description of Artificial Sequence: Synthetic peptide"
TSGMSVG

SEQ ID NO: 1986 - protein, 15 aa, Artificial Sequence
  source: /note="Description of Artificial Sequence: Synthetic peptide"
DIWWDDKKDYNPSLK

SEQ ID NO: 1987 - protein, 10 aa, Artificial Sequence
  source: /note="Description of Artificial Sequence: Synthetic peptide"
SMITNWYFDV

SEQ ID NO: 1988 - protein, 9 aa, Artificial Sequence
  source: /note="Description of Artificial Sequence: Synthetic peptide"
GFSLSTSGM

SEQ ID NO: 1989 - protein, 5 aa, Artificial Sequence
  source: /note="Description of Artificial Sequence: Synthetic peptide"
WWDDK

SEQ ID NO: 1990 - protein, 10 aa, Artificial Sequence
  source: /note="Description of Artificial Sequence: Synthetic peptide"
SMITNWYFDV

SEQ ID NO: 1991 - protein, 120 aa, Artificial Sequence; identical to SEQ ID NO: 55
  source: /note="Description of Artificial Sequence: Synthetic polypeptide"

SEQ ID NO: 1992 - protein, 450 aa, Artificial Sequence; identical to SEQ ID NO: 56
  source: /note="Description of Artificial Sequence: Synthetic polypeptide"

SEQ ID NO: 1993 - protein, 10 aa, Artificial Sequence
  source: /note="Description of Artificial Sequence: Synthetic peptide"
KAQLSVGYMH

SEQ ID NO: 1994 - protein, 339 aa, Artificial Sequence
  source: /note="Description of Artificial Sequence: Synthetic polypeptide"
DTSPAPPACDLRVLSKLLRDSHVLHSRLSQCPEVHPLPTPVLLPAVDFSLGEWKTQMEETKAQDILGAVTLLLEGVMAARGQLGPTCLSSLLGQLSGQVRLLLGALQSLLGTQLPPQGRTTAHKDPNAIFLSFQHLLRGKVRFLMLVGGSTLCVRRAPPTTAVPSRTSLVLTLNELPNRTSGLLETNFTASARTTGSGLLKWQQGFRAKIPGLLNQTSRSLDQIPGYLNRIHELLNGTRGLFPGPSRRTLGAPDISSGTSDTGSLPPNLQPGYSPSPTHPPTGQYTLFPLPPTLPTPVVQLHPLLPDPSAPTPTPTSPLLNTSYTHSQNLSQEGSKLAS

SEQ ID NO: 1995 - protein, 9 aa, Artificial Sequence
  source: /note="Description of Artificial Sequence: Synthetic peptide"
FQGSGYPFT

SEQ ID NO: 1996 - protein, 6 aa, Artificial Sequence
  source: /note="Description of Artificial Sequence: Synthetic peptide"
QLSVGY

SEQ ID NO: 1997 - protein, 335 aa, Artificial Sequence
  source: /note="Description of Artificial Sequence: Synthetic polypeptide"
DTSPAPPACDLRVLSKLLRDSHVLHSRLSQCPEVHPLPTPVLLPAVDFSLGEWKTQMEETKAQDILGAVTLLLEGVMAARGQLGPTCLSSLLGQLSGQVRLLLGALQSLLGTQLPPQGRTTAHKDPNAIFLSFQHLLRGKVRFLMLVGGSTLCVRRAPPTTAVPSRTSLVLTLNELPNRTSGLLETNFTASARTTGSGLLKWQQGFRAKIPGLLNQTSRSLDQIPGYLNRIHELLNGTRGLFPGPSRRTLGAPDISSGTSDTGSLPPNLQPGYSPSPTHPPTGQYTLFPLPPTLPTPVVQLHPLLPDPSAPTPTPTSPLLNTSYTHSQNLSQEGS

SEQ ID NO: 1998 - protein, 6 aa, Artificial Sequence
  source: /note="Description of Artificial Sequence: Synthetic peptide"
GSGYPF

SEQ ID NO: 1999 - protein, 438 aa, Artificial Sequence
  source: /note="Description of Artificial Sequence: Synthetic polypeptide"
DIQMTQSPSTLSASVGDRVTITCKAQLSVGYMHWYQQKPGKAPKLLIYDTSPAPPACDLRVLSKLLRDSHVLHSRLSQCPEVHPLPTPVLLPAVDFSLGEWKTQMEETKAQDILGAVTLLLEGVMAARGQLGPTCLSSLLGQLSGQVRLLLGALQSLLGTQLPPQGRTTAHKDPNAIFLSFQHLLRGKVRFLMLVGGSTLCVRRAPPTTAVPSRTSLVLTLNELPNRTSGLLETNFTASARTTGSGLLKWQQGFRAKIPGLLNQTSRSLDQIPGYLNRIHELLNGTRGLFPGPSRRTLGAPDISSGTSDTGSLPPNLQPGYSPSPTHPPTGQYTLFPLPPTLPTPVVQLHPLLPDPSAPTPTPTSPLLNTSYTHSQNLSQEGSKLASGVPSRFSGSGSGTEFTLTISSLQPDDFATYYCFQGSGYPFTFGGGTKLEIK

SEQ ID NO: 2000 - protein, 545 aa, Artificial Sequence
  source: /note="Description of Artificial Sequence: Synthetic polypeptide"
DIQMTQSPSTLSASVGDRVTITCKAQLSVGYMHWYQQKPGKAPKLLIYDTSPAPPACDLRVLSKLLRDSHVLHSRLSQCPEVHPLPTPVLLPAVDFSLGEWKTQMEETKAQDILGAVTLLLEGVMAARGQLGPTCLSSLLGQLSGQVRLLLGALQSLLGTQLPPQGRTTAHKDPNAIFLSFQHLLRGKVRFLMLVGGSTLCVRRAPPTTAVPSRTSLVLTLNELPNRTSGLLETNFTASARTTGSGLLKWQQGFRAKIPGLLNQTSRSLDQIPGYLNRIHELLNGTRGLFPGPSRRTLGAPDISSGTSDTGSLPPNLQPGYSPSPTHPPTGQYTLFPLPPTLPTPVVQLHPLLPDPSAPTPTPTSPLLNTSYTHSQNLSQEGSKLASGVPSRFSGSGSGTEFTLTISSLQPDDFATYYCFQGSGYPFTFGGGTKLEIKRTVAAPSVFIFPPSDEQLKSGTASVVCLLNNFYPREAKVQWKVDNALQSGNSQESVTEQDSKDSTYSLSSTLTLSKADYEKHKVYACEVTHQGLSSPVTKSFNRGEC

SEQ ID NO: 2001 - protein, 7 aa, Artificial Sequence
  source: /note="Description of Artificial Sequence: Synthetic peptide"
TSGMSVG

SEQ ID NO: 2002 - protein, 15 aa, Artificial Sequence
  source: /note="Description of Artificial Sequence: Synthetic peptide"
DIWWDDKKDYNPSLK

SEQ ID NO: 2003 - protein, 10 aa, Artificial Sequence
  source: /note="Description of Artificial Sequence: Synthetic peptide"
SMITNWYFDV

SEQ ID NO: 2004 - protein, 9 aa, Artificial Sequence
  source: /note="Description of Artificial Sequence: Synthetic peptide"
GFSLSTSGM

SEQ ID NO: 2005 - protein, 5 aa, Artificial Sequence
  source: /note="Description of Artificial Sequence: Synthetic peptide"
WWDDK

SEQ ID NO: 2006 - protein, 10 aa, Artificial Sequence
  source: /note="Description of Artificial Sequence: Synthetic peptide"
SMITNWYFDV

SEQ ID NO: 2007 - protein, 120 aa, Artificial Sequence; identical to SEQ ID NO: 55
  source: /note="Description of Artificial Sequence: Synthetic polypeptide"

SEQ ID NO: 2008 - protein, 450 aa, Artificial Sequence; identical to SEQ ID NO: 56
  source: /note="Description of Artificial Sequence: Synthetic polypeptide"

SEQ ID NO: 2009 - protein, 10 aa, Artificial Sequence
  source: /note="Description of Artificial Sequence: Synthetic peptide"
KAQLSVGYMH

SEQ ID NO: 2010 - protein, 7 aa, Artificial Sequence
  source: /note="Description of Artificial Sequence: Synthetic peptide"
DTSKLAS

SEQ ID NO: 2011 - protein, 341 aa, Artificial Sequence
  source: /note="Description of Artificial Sequence: Synthetic polypeptide"
FQGSGSPAPPACDLRVLSKLLRDSHVLHSRLSQCPEVHPLPTPVLLPAVDFSLGEWKTQMEETKAQDILGAVTLLLEGVMAARGQLGPTCLSSLLGQLSGQVRLLLGALQSLLGTQLPPQGRTTAHKDPNAIFLSFQHLLRGKVRFLMLVGGSTLCVRRAPPTTAVPSRTSLVLTLNELPNRTSGLLETNFTASARTTGSGLLKWQQGFRAKIPGLLNQTSRSLDQIPGYLNRIHELLNGTRGLFPGPSRRTLGAPDISSGTSDTGSLPPNLQPGYSPSPTHPPTGQYTLFPLPPTLPTPVVQLHPLLPDPSAPTPTPTSPLLNTSYTHSQNLSQEGYPFT

SEQ ID NO: 2012 - protein, 6 aa, Artificial Sequence
  source: /note="Description of Artificial Sequence: Synthetic peptide"
QLSVGY

SEQ ID NO: 2013 - protein, 3 aa, Artificial Sequence
  source: /note="Description of Artificial Sequence: Synthetic peptide"
DTS

SEQ ID NO: 2014 - protein, 338 aa, Artificial Sequence
  source: /note="Description of Artificial Sequence: Synthetic polypeptide"
GSGSPAPPACDLRVLSKLLRDSHVLHSRLSQCPEVHPLPTPVLLPAVDFSLGEWKTQMEETKAQDILGAVTLLLEGVMAARGQLGPTCLSSLLGQLSGQVRLLLGALQSLLGTQLPPQGRTTAHKDPNAIFLSFQHLLRGKVRFLMLVGGSTLCVRRAPPTTAVPSRTSLVLTLNELPNRTSGLLETNFTASARTTGSGLLKWQQGFRAKIPGLLNQTSRSLDQIPGYLNRIHELLNGTRGLFPGPSRRTLGAPDISSGTSDTGSLPPNLQPGYSPSPTHPPTGQYTLFPLPPTLPTPVVQLHPLLPDPSAPTPTPTSPLLNTSYTHSQNLSQEGYPF

SEQ ID NO: 2015 - protein, 438 aa, Artificial Sequence
  source: /note="Description of Artificial Sequence: Synthetic polypeptide"
DIQMTQSPSTLSASVGDRVTITCKAQLSVGYMHWYQQKPGKAPKLLIYDTSKLASGVPSRFSGSGSGTEFTLTISSLQPDDFATYYCFQGSGSPAPPACDLRVLSKLLRDSHVLHSRLSQCPEVHPLPTPVLLPAVDFSLGEWKTQMEETKAQDILGAVTLLLEGVMAARGQLGPTCLSSLLGQLSGQVRLLLGALQSLLGTQLPPQGRTTAHKDPNAIFLSFQHLLRGKVRFLMLVGGSTLCVRRAPPTTAVPSRTSLVLTLNELPNRTSGLLETNFTASARTTGSGLLKWQQGFRAKIPGLLNQTSRSLDQIPGYLNRIHELLNGTRGLFPGPSRRTLGAPDISSGTSDTGSLPPNLQPGYSPSPTHPPTGQYTLFPLPPTLPTPVVQLHPLLPDPSAPTPTPTSPLLNTSYTHSQNLSQEGYPFTFGGGTKLEIK

SEQ ID NO: 2016 - protein, 545 aa, Artificial Sequence
  source: /note="Description of Artificial Sequence: Synthetic polypeptide"
DIQMTQSPSTLSASVGDRVTITCKAQLSVGYMHWYQQKPGKAPKLLIYDTSKLASGVPSRFSGSGSGTEFTLTISSLQPDDFATYYCFQGSGSPAPPACDLRVLSKLLRDSHVLHSRLSQCPEVHPLPTPVLLPAVDFSLGEWKTQMEETKAQDILGAVTLLLEGVMAARGQLGPTCLSSLLGQLSGQVRLLLGALQSLLGTQLPPQGRTTAHKDPNAIFLSFQHLLRGKVRFLMLVGGSTLCVRRAPPTTAVPSRTSLVLTLNELPNRTSGLLETNFTASARTTGSGLLKWQQGFRAKIPGLLNQTSRSLDQIPGYLNRIHELLNGTRGLFPGPSRRTLGAPDISSGTSDTGSLPPNLQPGYSPSPTHPPTGQYTLFPLPPTLPTPVVQLHPLLPDPSAPTPTPTSPLLNTSYTHSQNLSQEGYPFTFGGGTKLEIKRTVAAPSVFIFPPSDEQLKSGTASVVCLLNNFYPREAKVQWKVDNALQSGNSQESVTEQDSKDSTYSLSSTLTLSKADYEKHKVYACEVTHQGLSSPVTKSFNRGEC

SEQ ID NO: 2017 - protein, 133 aa, Artificial Sequence
  source: /note="Description of Artificial Sequence: Synthetic polypeptide"
GCPTLAGILDINFLINKMQEDPASKCHCSANVTSCLCLGIPSDNCTRPCFSERLSQMTNTTMQTRYPLIFSRVKKSVEVLKNNKCPYFSCEQPCNQTTAGNALTFLKSLLEIFQKEKMRGMRGKISTSGMSVG

SEQ ID NO: 2018 - protein, 16 aa, Artificial Sequence
  source: /note="Description of Artificial Sequence: Synthetic peptide"
DIWWDDKKDYNPSLKS

SEQ ID NO: 2019 - protein, 10 aa, Artificial Sequence
  source: /note="Description of Artificial Sequence: Synthetic peptide"
SMITNWYFDV

SEQ ID NO: 2020 - protein, 135 aa, Artificial Sequence
  source: /note="Description of Artificial Sequence: Synthetic polypeptide"
GFSLQGCPTLAGILDINFLINKMQEDPASKCHCSANVTSCLCLGIPSDNCTRPCFSERLSQMTNTTMQTRYPLIFSRVKKSVEVLKNNKCPYFSCEQPCNQTTAGNALTFLKSLLEIFQKEKMRGMRGKISTSGM

SEQ ID NO: 2021 - protein, 5 aa, Artificial Sequence
  source: /note="Description of Artificial Sequence: Synthetic peptide"
WWDDK

SEQ ID NO: 2022 - protein, 10 aa, Artificial Sequence
  source: /note="Description of Artificial Sequence: Synthetic peptide"
SMITNWYFDV

SEQ ID NO: 2023 - protein, 246 aa, Artificial Sequence
  source: /note="Description of Artificial Sequence: Synthetic polypeptide"
QVTLRESGPALVKPTQTLTLTCTFSGFSLQGCPTLAGILDINFLINKMQEDPASKCHCSANVTSCLCLGIPSDNCTRPCFSERLSQMTNTTMQTRYPLIFSRVKKSVEVLKNNKCPYFSCEQPCNQTTAGNALTFLKSLLEIFQKEKMRGMRGKISTSGMSVGWIRQPPGKALEWLADIWWDDKKDYNPSLKSRLTISKDTSKNQVVLKVTNMDPADTATYYCARSMITNWYFDVWGAGTTVTVSS

SEQ ID NO: 2024 - protein, 576 aa, Artificial Sequence
  source: /note="Description of Artificial Sequence: Synthetic polypeptide"
QVTLRESGPALVKPTQTLTLTCTFSGFSLQGCPTLAGILDINFLINKMQEDPASKCHCSANVTSCLCLGIPSDNCTRPCFSERLSQMTNTTMQTRYPLIFSRVKKSVEVLKNNKCPYFSCEQPCNQTTAGNALTFLKSLLEIFQKEKMRGMRGKISTSGMSVGWIRQPPGKALEWLADIWWDDKKDYNPSLKSRLTISKDTSKNQVVLKVTNMDPADTATYYCARSMITNWYFDVWGAGTTVTVSSASTKGPSVFPLAPSSKSTSGGTAALGCLVKDYFPEPVTVSWNSGALTSGVHTFPAVLQSSGLYSLSSVVTVPSSSLGTQTYICNVNHKPSNTKVDKRVEPKSCDKTHTCPPCPAPELLGGPSVFLFPPKPKDTLMISRTPEVTCVVVAVSHEDPEVKFNWYVDGVEVHNAKTKPREEQYNSTYRVVSVLTVLHQDWLNGKEYKCKVSNKALAAPIEKTISKAKGQPREPQVYTLPPSREEMTKNQVSLTCLVKGFYPSDIAVEWESNGQPENNYKTTPPVLDSDGSFFLYSKLTVDKSRWQQGNVFSCSVMHEALHNHYTQKSLSLSPGK

SEQ ID NO: 2025 - protein, 10 aa, Artificial Sequence
  source: /note="Description of Artificial Sequence: Synthetic peptide"
KAQLSVGYMH

SEQ ID NO: 2026 - protein, 7 aa, Artificial Sequence
  source: /note="Description of Artificial Sequence: Synthetic peptide"
DTSKLAS

SEQ ID NO: 2027 - protein, 9 aa, Artificial Sequence
  source: /note="Description of Artificial Sequence: Synthetic peptide"
FQGSGYPFT

SEQ ID NO: 2028 - protein, 6 aa, Artificial Sequence
  source: /note="Description of Artificial Sequence: Synthetic peptide"
QLSVGY

SEQ ID NO: 2029 - protein, 3 aa, Artificial Sequence
  source: /note="Description of Artificial Sequence: Synthetic peptide"
DTS

SEQ ID NO: 2030 - protein, 6 aa, Artificial Sequence
  source: /note="Description of Artificial Sequence: Synthetic peptide"
GSGYPF

SEQ ID NO: 2031 - protein, 106 aa, Artificial Sequence; identical to SEQ ID NO: 15
  source: /note="Description of Artificial Sequence: Synthetic polypeptide"

SEQ ID NO: 2032 - protein, 213 aa, Artificial Sequence; identical to SEQ ID NO: 16
  source: /note="Description of Artificial Sequence: Synthetic polypeptide"

SEQ ID NO: 2033 - protein, 7 aa, Artificial Sequence
  source: /note="Description of Artificial Sequence: Synthetic peptide"
TSGMSVG

SEQ ID NO: 2034 - protein, 142 aa, Artificial Sequence
  source: /note="Description of Artificial Sequence: Synthetic polypeptide"
DIWWDQGCPTLAGILDINFLINKMQEDPASKCHCSANVTSCLCLGIPSDNCTRPCFSERLSQMTNTTMQTRYPLIFSRVKKSVEVLKNNKCPYFSCEQPCNQTTAGNALTFLKSLLEIFQKEKMRGMRGKIDKKDYNPSLKS

SEQ ID NO: 2035 - protein, 10 aa, Artificial Sequence
  source: /note="Description of Artificial Sequence: Synthetic peptide"
SMITNWYFDV

SEQ ID NO: 2036 - protein, 9 aa, Artificial Sequence
  source: /note="Description of Artificial Sequence: Synthetic peptide"
GFSLSTSGM

SEQ ID NO: 2037 - protein, 131 aa, Artificial Sequence
  source: /note="Description of Artificial Sequence: Synthetic polypeptide"
WWDQGCPTLAGILDINFLINKMQEDPASKCHCSANVTSCLCLGIPSDNCTRPCFSERLSQMTNTTMQTRYPLIFSRVKKSVEVLKNNKCPYFSCEQPCNQTTAGNALTFLKSLLEIFQKEKMRGMRGKIDK

SEQ ID NO: 2038 - protein, 10 aa, Artificial Sequence
  source: /note="Description of Artificial Sequence: Synthetic peptide"
SMITNWYFDV

SEQ ID NO: 2039 - protein, 246 aa, Artificial Sequence
  source: /note="Description of Artificial Sequence: Synthetic polypeptide"
QVTLRESGPALVKPTQTLTLTCTFSGFSLSTSGMSVGWIRQPPGKALEWLADIWWDQGCPTLAGILDINFLINKMQEDPASKCHCSANVTSCLCLGIPSDNCTRPCFSERLSQMTNTTMQTRYPLIFSRVKKSVEVLKNNKCPYFSCEQPCNQTTAGNALTFLKSLLEIFQKEKMRGMRGKIDKKDYNPSLKSRLTISKDTSANQVVLKVTNMDPADTATYYCARSMITNWYFDVWGAGTTVTVSS

SEQ ID NO: 2040 - protein, 576 aa, Artificial Sequence
  source: /note="Description of Artificial Sequence: Synthetic polypeptide"
QVTLRESGPALVKPTQTLTLTCTFSGFSLSTSGMSVGWIRQPPGKALEWLADIWWDQGCPTLAGILDINFLINKMQEDPASKCHCSANVTSCLCLGIPSDNCTRPCFSERLSQMTNTTMQTRYPLIFSRVKKSVEVLKNNKCPYFSCEQPCNQTTAGNALTFLKSLLEIFQKEKMRGMRGKIDKKDYNPSLKSRLTISKDTSANQVVLKVTNMDPADTATYYCARSMITNWYFDVWGAGTTVTVSSASTKGPSVFPLAPSSKSTSGGTAALGCLVKDYFPEPVTVSWNSGALTSGVHTFPAVLQSSGLYSLSSVVTVPSSSLGTQTYICNVNHKPSNTKVDKRVEPKSCDKTHTCPPCPAPELLGGPSVFLFPPKPKDTLMISRTPEVTCVVVAVSHEDPEVKFNWYVDGVEVHNAKTKPREEQYNSTYRVVSVLTVLHQDWLNGKEYKCKVSNKALAAPIEKTISKAKGQPREPQVYTLPPSREEMTKNQVSLTCLVKGFYPSDIAVEWESNGQPENNYKTTPPVLDSDGSFFLYSKLTVDKSRWQQGNVFSCSVMHEALHNHYTQKSLSLSPGK

SEQ ID NO: 2041 - protein, 10 aa, Artificial Sequence
  source: /note="Description of Artificial Sequence: Synthetic peptide"
KAQLSVGYMH

SEQ ID NO: 2042 - protein, 7 aa, Artificial Sequence
  source: /note="Description of Artificial Sequence: Synthetic peptide"
DTSKLAS

SEQ ID NO: 2043 - protein, 9 aa, Artificial Sequence
  source: /note="Description of Artificial Sequence: Synthetic peptide"
FQGSGYPFT

SEQ ID NO: 2044 - protein, 6 aa, Artificial Sequence
  source: /note="Description of Artificial Sequence: Synthetic peptide"
QLSVGY

SEQ ID NO: 2045 - protein, 3 aa, Artificial Sequence
  source: /note="Description of Artificial Sequence: Synthetic peptide"
DTS

SEQ ID NO: 2046 - protein, 6 aa, Artificial Sequence
  source: /note="Description of Artificial Sequence: Synthetic peptide"
GSGYPF

SEQ ID NO: 2047 - protein, 106 aa, Artificial Sequence; identical to SEQ ID NO: 15
  source: /note="Description of Artificial Sequence: Synthetic polypeptide"

SEQ ID NO: 2048 - protein, 213 aa, Artificial Sequence; identical to SEQ ID NO: 16
  source: /note="Description of Artificial Sequence: Synthetic polypeptide"

SEQ ID NO: 2049 - protein, 7 aa, Artificial Sequence
  source: /note="Description of Artificial Sequence: Synthetic peptide"
TSGMSVG

SEQ ID NO: 2050 - protein, 16 aa, Artificial Sequence
  source: /note="Description of Artificial Sequence: Synthetic peptide"
DIWWDDKKDYNPSLKS

SEQ ID NO: 2051 - protein, 136 aa, Artificial Sequence
  source: /note="Description of Artificial Sequence: Synthetic polypeptide"
SMITQGCPTLAGILDINFLINKMQEDPASKCHCSANVTSCLCLGIPSDNCTRPCFSERLSQMTNTTMQTRYPLIFSRVKKSVEVLKNNKCPYFSCEQPCNQTTAGNALTFLKSLLEIFQKEKMRGMRGKINWYFDV

SEQ ID NO: 2052 - protein, 9 aa, Artificial Sequence
  source: /note="Description of Artificial Sequence: Synthetic peptide"
GFSLSTSGM

SEQ ID NO: 2053 - protein, 5 aa, Artificial Sequence
  source: /note="Description of Artificial Sequence: Synthetic peptide"
WWDDK

SEQ ID NO: 2054 - protein, 136 aa, Artificial Sequence; identical to SEQ ID NO: 2051
  source: /note="Description of Artificial Sequence: Synthetic polypeptide"

SEQ ID NO: 2055 - protein, 246 aa, Artificial Sequence
  source: /note="Description of Artificial Sequence: Synthetic polypeptide"
QVTLRESGPALVKPTQTLTLTCTFSGFSLSTSGMSVGWIRQPPGKALEWLADIWWDDKKDYNPSLKSRLTISKDTSKNQVVLKVTNMDPADTATYYCARSMITQGCPTLAGILDINFLINKMQEDPASKCHCSANVTSCLCLGIPSDNCTRPCFSERLSQMTNTTMQTRYPLIFSRVKKSVEVLKNNKCPYFSCEQPCNQTTAGNALTFLKSLLEIFQKEKMRGMRGKINWYFDVWGAGTTVTVSS

SEQ ID NO: 2056 - protein, 576 aa, Artificial Sequence
  source: /note="Description of Artificial Sequence: Synthetic polypeptide"
QVTLRESGPALVKPTQTLTLTCTFSGFSLSTSGMSVGWIRQPPGKALEWLADIWWDDKKDYNPSLKSRLTISKDTSKNQVVLKVTNMDPADTATYYCARSMITQGCPTLAGILDINFLINKMQEDPASKCHCSANVTSCLCLGIPSDNCTRPCFSERLSQMTNTTMQTRYPLIFSRVKKSVEVLKNNKCPYFSCEQPCNQTTAGNALTFLKSLLEIFQKEKMRGMRGKINWYFDVWGAGTTVTVSSASTKGPSVFPLAPSSKSTSGGTAALGCLVKDYFPEPVTVSWNSGALTSGVHTFPAVLQSSGLYSLSSVVTVPSSSLGTQTYICNVNHKPSNTKVDKRVEPKSCDKTHTCPPCPAPELLGGPSVFLFPPKPKDTLMISRTPEVTCVVVAVSHEDPEVKFNWYVDGVEVHNAKTKPREEQYNSTYRVVSVLTVLHQDWLNGKEYKCKVSNKALAAPIEKTISKAKGQPREPQVYTLPPSREEMTKNQVSLTCLVKGFYPSDIAVEWESNGQPENNYKTTPPVLDSDGSFFLYSKLTVDKSRWQQGNVFSCSVMHEALHNHYTQKSLSLSPGK

SEQ ID NO: 2057 - protein, 10 aa, Artificial Sequence
  source: /note="Description of Artificial Sequence: Synthetic peptide"
KAQLSVGYMH

SEQ ID NO: 2058 - protein, 7 aa, Artificial Sequence
  source: /note="Description of Artificial Sequence: Synthetic peptide"
DTSKLAS

SEQ ID NO: 2059 - protein, 9 aa, Artificial Sequence
  source: /note="Description of Artificial Sequence: Synthetic peptide"
FQGSGYPFT

SEQ ID NO: 2060 - protein, 6 aa, Artificial Sequence
  source: /note="Description of Artificial Sequence: Synthetic peptide"
QLSVGY

SEQ ID NO: 2061 - protein, 3 aa, Artificial Sequence
  source: /note="Description of Artificial Sequence: Synthetic peptide"
DTS

SEQ ID NO: 2062 - protein, 6 aa, Artificial Sequence
  source: /note="Description of Artificial Sequence: Synthetic peptide"
GSGYPF

SEQ ID NO: 2063 - protein, 106 aa, Artificial Sequence; identical to SEQ ID NO: 15
  source: /note="Description of Artificial Sequence: Synthetic polypeptide"

SEQ ID NO: 2064 - protein, 213 aa, Artificial Sequence; identical to SEQ ID NO: 16
  source: /note="Description of Artificial Sequence: Synthetic polypeptide"

SEQ ID NO: 2065 - protein, 7 aa, Artificial Sequence
  source: /note="Description of Artificial Sequence: Synthetic peptide"
TSGMSVG

SEQ ID NO: 2066 - protein, 15 aa, Artificial Sequence
  source: /note="Description of Artificial Sequence: Synthetic peptide"
DIWWDDKKDYNPSLK

SEQ ID NO: 2067 - protein, 10 aa, Artificial Sequence
  source: /note="Description of Artificial Sequence: Synthetic peptide"
SMITNWYFDV

SEQ ID NO: 2068 - protein, 9 aa, Artificial Sequence
  source: /note="Description of Artificial Sequence: Synthetic peptide"
GFSLSTSGM

SEQ ID NO: 2069 - protein, 5 aa, Artificial Sequence
  source: /note="Description of Artificial Sequence: Synthetic peptide"
WWDDK

SEQ ID NO: 2070 - protein, 10 aa, Artificial Sequence
  source: /note="Description of Artificial Sequence: Synthetic peptide"
SMITNWYFDV

SEQ ID NO: 2071 - protein, 120 aa, Artificial Sequence; identical to SEQ ID NO: 55
  source: /note="Description of Artificial Sequence: Synthetic polypeptide"

SEQ ID NO: 2072 - protein, 450 aa, Artificial Sequence; identical to SEQ ID NO: 56
  source: /note="Description of Artificial Sequence: Synthetic polypeptide"

SEQ ID NO: 2073 - protein, 136 aa, Artificial Sequence
  source: /note="Description of Artificial Sequence: Synthetic polypeptide"
KAQLSQGCPTLAGILDINFLINKMQEDPASKCHCSANVTSCLCLGIPSDNCTRPCFSERLSQMTNTTMQTRYPLIFSRVKKSVEVLKNNKCPYFSCEQPCNQTTAGNALTFLKSLLEIFQKEKMRGMRGKIVGYMH

SEQ ID NO: 2074 - protein, 7 aa, Artificial Sequence
  source: /note="Description of Artificial Sequence: Synthetic peptide"
DTSKLAS

SEQ ID NO: 2075 - protein, 9 aa, Artificial Sequence
  source: /note="Description of Artificial Sequence: Synthetic peptide"
FQGSGYPFT

SEQ ID NO: 2076 - protein, 132 aa, Artificial Sequence
  source: /note="Description of Artificial Sequence: Synthetic polypeptide"
QLSQGCPTLAGILDINFLINKMQEDPASKCHCSANVTSCLCLGIPSDNCTRPCFSERLSQMTNTTMQTRYPLIFSRVKKSVEVLKNNKCPYFSCEQPCNQTTAGNALTFLKSLLEIFQKEKMRGMRGKIVGY

SEQ ID NO: 2077 - protein, 3 aa, Artificial Sequence
  source: /note="Description of Artificial Sequence: Synthetic peptide"
DTS

SEQ ID NO: 2078 - protein, 6 aa, Artificial Sequence
  source: /note="Description of Artificial Sequence: Synthetic peptide"
GSGYPF

SEQ ID NO: 2079 - protein, 232 aa, Artificial Sequence
  source: /note="Description of Artificial Sequence: Synthetic polypeptide"
DIQMTQSPSTLSASVGDRVTITCKAQLSQGCPTLAGILDINFLINKMQEDPASKCHCSANVTSCLCLGIPSDNCTRPCFSERLSQMTNTTMQTRYPLIFSRVKKSVEVLKNNKCPYFSCEQPCNQTTAGNALTFLKSLLEIFQKEKMRGMRGKIVGYMHWYQQKPGKAPKLLIYDTSKLASGVPSRFSGSGSGTEFTLTISSLQPDDFATYYCFQGSGYPFTFGGGTKLEIK

SEQ ID NO: 2080 - protein, 339 aa, Artificial Sequence
  source: /note="Description of Artificial Sequence: Synthetic polypeptide"
DIQMTQSPSTLSASVGDRVTITCKAQLSQGCPTLAGILDINFLINKMQEDPASKCHCSANVTSCLCLGIPSDNCTRPCFSERLSQMTNTTMQTRYPLIFSRVKKSVEVLKNNKCPYFSCEQPCNQTTAGNALTFLKSLLEIFQKEKMRGMRGKIVGYMHWYQQKPGKAPKLLIYDTSKLASGVPSRFSGSGSGTEFTLTISSLQPDDFATYYCFQGSGYPFTFGGGTKLEIKRTVAAPSVFIFPPSDEQLKSGTASVVCLLNNFYPREAKVQWKVDNALQSGNSQESVTEQDSKDSTYSLSSTLTLSKADYEKHKVYACEVTHQGLSSPVTKSFNRGEC

SEQ ID NO: 2081 - protein, 7 aa, Artificial Sequence
  source: /note="Description of Artificial Sequence: Synthetic peptide"
TSGMSVG

SEQ ID NO: 2082 - protein, 15 aa, Artificial Sequence
  source: /note="Description of Artificial Sequence: Synthetic peptide"
DIWWDDKKDYNPSLK

SEQ ID NO: 2083 - protein, 10 aa, Artificial Sequence
  source: /note="Description of Artificial Sequence: Synthetic peptide"
SMITNWYFDV

SEQ ID NO: 2084 - protein, 9 aa, Artificial Sequence
  source: /note="Description of Artificial Sequence: Synthetic peptide"
GFSLSTSGM

SEQ ID NO: 2085 - protein, 5 aa, Artificial Sequence
  source: /note="Description of Artificial Sequence: Synthetic peptide"
WWDDK

SEQ ID NO: 2086 - protein, 10 aa, Artificial Sequence
  source: /note="Description of Artificial Sequence: Synthetic peptide"
SMITNWYFDV

SEQ ID NO: 2087 - protein, 120 aa, Artificial Sequence; identical to SEQ ID NO: 55
  source: /note="Description of Artificial Sequence: Synthetic polypeptide"

SEQ ID NO: 2088 - protein, 450 aa, Artificial Sequence; identical to SEQ ID NO: 56
  source: /note="Description of Artificial Sequence: Synthetic polypeptide"

SEQ ID NO: 2089 - protein, 10 aa, Artificial Sequence
  source: /note="Description of Artificial Sequence: Synthetic peptide"
KAQLSVGYMH

SEQ ID NO: 2090 - protein, 133 aa, Artificial Sequence
  source: /note="Description of Artificial Sequence: Synthetic polypeptide"
DTQGCPTLAGILDINFLINKMQEDPASKCHCSANVTSCLCLGIPSDNCTRPCFSERLSQMTNTTMQTRYPLIFSRVKKSVEVLKNNKCPYFSCEQPCNQTTAGNALTFLKSLLEIFQKEKMRGMRGKISKLAS

SEQ ID NO: 2091 - protein, 9 aa, Artificial Sequence
  source: /note="Description of Artificial Sequence: Synthetic peptide"
FQGSGYPFT

SEQ ID NO: 2092 - protein, 6 aa, Artificial Sequence
  source: /note="Description of Artificial Sequence: Synthetic peptide"
QLSVGY

SEQ ID NO: 2093 - protein, 129 aa, Artificial Sequence
  source: /note="Description of Artificial Sequence: Synthetic polypeptide"
DTQGCPTLAGILDINFLINKMQEDPASKCHCSANVTSCLCLGIPSDNCTRPCFSERLSQMTNTTMQTRYPLIFSRVKKSVEVLKNNKCPYFSCEQPCNQTTAGNALTFLKSLLEIFQKEKMRGMRGKIS

SEQ ID NO: 2094 - protein, 6 aa, Artificial Sequence
  source: /note="Description of Artificial Sequence: Synthetic peptide"
GSGYPF

SEQ ID NO: 2095 - protein, 232 aa, Artificial Sequence
  source: /note="Description of Artificial Sequence: Synthetic polypeptide"
DIQMTQSPSTLSASVGDRVTITCKAQLSVGYMHWYQQKPGKAPKLLIYDTQGCPTLAGILDINFLINKMQEDPASKCHCSANVTSCLCLGIPSDNCTRPCFSERLSQMTNTTMQTRYPLIFSRVKKSVEVLKNNKCPYFSCEQPCNQTTAGNALTFLKSLLEIFQKEKMRGMRGKISKLASGVPSRFSGSGSGTEFTLTISSLQPDDFATYYCFQGSGYPFTFGGGTKLEIK

SEQ ID NO: 2096 - protein, 339 aa, Artificial Sequence
  source: /note="Description of Artificial Sequence: Synthetic polypeptide"
DIQMTQSPSTLSASVGDRVTITCKAQLSVGYMHWYQQKPGKAPKLLIYDTQGCPTLAGILDINFLINKMQEDPASKCHCSANVTSCLCLGIPSDNCTRPCFSERLSQMTNTTMQTRYPLIFSRVKKSVEVLKNNKCPYFSCEQPCNQTTAGNALTFLKSLLEIFQKEKMRGMRGKISKLASGVPSRFSGSGSGTEFTLTISSLQPDDFATYYCFQGSGYPFTFGGGTKLEIKRTVAAPSVFIFPPSDEQLKSGTASVVCLLNNFYPREAKVQWKVDNALQSGNSQESVTEQDSKDSTYSLSSTLTLSKADYEKHKVYACEVTHQGLSSPVTKSFNRGEC

SEQ ID NO: 2097 - protein, 7 aa, Artificial Sequence
  source: /note="Description of Artificial Sequence: Synthetic peptide"
TSGMSVG

SEQ ID NO: 2098 - protein, 15 aa, Artificial Sequence
  source: /note="Description of Artificial Sequence: Synthetic peptide"
DIWWDDKKDYNPSLK

SEQ ID NO: 2099 - protein, 10 aa, Artificial Sequence
  source: /note="Description of Artificial Sequence: Synthetic peptide"
SMITNWYFDV

SEQ ID NO: 2100 - protein, 9 aa, Artificial Sequence
  source: /note="Description of Artificial Sequence: Synthetic peptide"
GFSLSTSGM

SEQ ID NO: 2101 - protein, 5 aa, Artificial Sequence
  source: /note="Description of Artificial Sequence: Synthetic peptide"
WWDDK

SEQ ID NO: 2102 - protein, 10 aa, Artificial Sequence
  source: /note="Description of Artificial Sequence: Synthetic peptide"
SMITNWYFDV

SEQ ID NO: 2103 - protein, 120 aa, Artificial Sequence; identical to SEQ ID NO: 55
  source: /note="Description of Artificial Sequence: Synthetic polypeptide"

SEQ ID NO: 2104 - protein, 450 aa, Artificial Sequence; identical to SEQ ID NO: 56
  source: /note="Description of Artificial Sequence: Synthetic polypeptide"

SEQ ID NO: 2105 - protein, 10 aa, Artificial Sequence
  source: /note="Description of Artificial Sequence: Synthetic peptide"
KAQLSVGYMH

SEQ ID NO: 2106 - protein, 7 aa, Artificial Sequence
  source: /note="Description of Artificial Sequence: Synthetic peptide"
DTSKLAS

SEQ ID NO: 2107 - protein, 135 aa, Artificial Sequence
  source: /note="Description of Artificial Sequence: Synthetic polypeptide"
FQGSGQGCPTLAGILDINFLINKMQEDPASKCHCSANVTSCLCLGIPSDNCTRPCFSERLSQMTNTTMQTRYPLIFSRVKKSVEVLKNNKCPYFSCEQPCNQTTAGNALTFLKSLLEIFQKEKMRGMRGKIYPFT

SEQ ID NO: 2108 - protein, 6 aa, Artificial Sequence
  source: /note="Description of Artificial Sequence: Synthetic peptide"
QLSVGY

SEQ ID NO: 2109 - protein, 3 aa, Artificial Sequence
  source: /note="Description of Artificial Sequence: Synthetic peptide"
DTS

SEQ ID NO: 2110 - protein, 132 aa, Artificial Sequence
  source: /note="Description of Artificial Sequence: Synthetic polypeptide"
GSGQGCPTLAGILDINFLINKMQEDPASKCHCSANVTSCLCLGIPSDNCTRPCFSERLSQMTNTTMQTRYPLIFSRVKKSVEVLKNNKCPYFSCEQPCNQTTAGNALTFLKSLLEIFQKEKMRGMRGKIYPF

SEQ ID NO: 2111 - protein, 232 aa, Artificial Sequence
  source: /note="Description of Artificial Sequence: Synthetic polypeptide"
DIQMTQSPSTLSASVGDRVTITCKAQLSVGYMHWYQQKPGKAPKLLIYDTSKLASGVPSRFSGSGSGTEFTLTISSLQPDDFATYYCFQGSGQGCPTLAGILDINFLINKMQEDPASKCHCSANVTSCLCLGIPSDNCTRPCFSERLSQMTNTTMQTRYPLIFSRVKKSVEVLKNNKCPYFSCEQPCNQTTAGNALTFLKSLLEIFQKEKMRGMRGKIYPFTFGGGTKLEIK

SEQ ID NO: 2112 - protein, 339 aa, Artificial Sequence
  source: /note="Description of Artificial Sequence: Synthetic polypeptide"
DIQMTQSPSTLSASVGDRVTITCKAQLSVGYMHWYQQKPGKAPKLLIYDTSKLASGVPSRFSGSGSGTEFTLTISSLQPDDFATYYCFQGSGQGCPTLAGILDINFLINKMQEDPASKCHCSANVTSCLCLGIPSDNCTRPCFSERLSQMTNTTMQTRYPLIFSRVKKSVEVLKNNKCPYFSCEQPCNQTTAGNALTFLKSLLEIFQKEKMRGMRGKIYPFTFGGGTKLEIKRTVAAPSVFIFPPSDEQLKSGTASVVCLLNNFYPREAKVQWKVDNALQSGNSQESVTEQDSKDSTYSLSSTLTLSKADYEKHKVYACEVTHQGLSSPVTKSFNRGEC

SEQ ID NO: 2113 - protein, 138 aa, Artificial Sequence
  source: /note="Description of Artificial Sequence: Synthetic polypeptide"
DFTNCDFEKIKAAYLSTISKDLITYMSGTKSTEFNNTVSCSNRPHCLTEIQSLTFNPTAGCASLAKEMFAMKTKAALAIWCPGYSETQINATQAMKKRRKRKVTTNKCLEQVSQLQGLWRRFNRPLLKQQSTSGMSVG

SEQ ID NO: 2114 - protein, 16 aa, Artificial Sequence
  source: /note="Description of Artificial Sequence: Synthetic peptide"
DIWWDDKKDYNPSLKS

SEQ ID NO: 2115 - protein, 10 aa, Artificial Sequence
  source: /note="Description of Artificial Sequence: Synthetic peptide"
SMITNWYFDV

SEQ ID NO: 2116 - protein, 140 aa, Artificial Sequence
  source: /note="Description of Artificial Sequence: Synthetic polypeptide"
GFSLYDFTNCDFEKIKAAYLSTISKDLITYMSGTKSTEFNNTVSCSNRPHCLTEIQSLTFNPTAGCASLAKEMFAMKTKAALAIWCPGYSETQINATQAMKKRRKRKVTTNKCLEQVSQLQGLWRRFNRPLLKQQSTSGM

SEQ ID NO: 2117 - protein, 5 aa, Artificial Sequence
  source: /note="Description of Artificial Sequence: Synthetic peptide"
WWDDK

SEQ ID NO: 2118 - protein, 10 aa, Artificial Sequence
  source: /note="Description of Artificial Sequence: Synthetic peptide"
SMITNWYFDV

SEQ ID NO: 2119 - protein, 251 aa, Artificial Sequence
  source: /note="Description of Artificial Sequence: Synthetic polypeptide"
QVTLRESGPALVKPTQTLTLTCTFSGFSLYDFTNCDFEKIKAAYLSTISKDLITYMSGTKSTEFNNTVSCSNRPHCLTEIQSLTFNPTAGCASLAKEMFAMKTKAALAIWCPGYSETQINATQAMKKRRKRKVTTNKCLEQVSQLQGLWRRFNRPLLKQQSTSGMSVGWIRQPPGKALEWLADIWWDDKKDYNPSLKSRLTISKDTSKNQVVLKVTNMDPADTATYYCARSMITNWYFDVWGAGTTVTVSS

SEQ ID NO: 2120 - protein, 581 aa, Artificial Sequence
  source: /note="Description of Artificial Sequence: Synthetic polypeptide"
QVTLRESGPALVKPTQTLTLTCTFSGFSLYDFTNCDFEKIKAAYLSTISKDLITYMSGTKSTEFNNTVSCSNRPHCLTEIQSLTFNPTAGCASLAKEMFAMKTKAALAIWCPGYSETQINATQAMKKRRKRKVTTNKCLEQVSQLQGLWRRFNRPLLKQQSTSGMSVGWIRQPPGKALEWLADIWWDDKKDYNPSLKSRLTISKDTSKNQVVLKVTNMDPADTATYYCARSMITNWYFDVWGAGTTVTVSSASTKGPSVFPLAPSSKSTSGGTAALGCLVKDYFPEPVTVSWNSGALTSGVHTFPAVLQSSGLYSLSSVVTVPSSSLGTQTYICNVNHKPSNTKVDKRVEPKSCDKTHTCPPCPAPELLGGPSVFLFPPKPKDTLMISRTPEVTCVVVAVSHEDPEVKFNWYVDGVEVHNAKTKPREEQYNSTYRVVSVLTVLHQDWLNGKEYKCKVSNKALAAPIEKTISKAKGQPREPQVYTLPPSREEMTKNQVSLTCLVKGFYPSDIAVEWESNGQPENNYKTTPPVLDSDGSFFLYSKLTVDKSRWQQGNVFSCSVMHEALHNHYTQKSLSLSPGK

SEQ ID NO: 2121 - protein, 10 aa, Artificial Sequence
  source: /note="Description of Artificial Sequence: Synthetic peptide"
KAQLSVGYMH

SEQ ID NO: 2122 - protein, 7 aa, Artificial Sequence
  source: /note="Description of Artificial Sequence: Synthetic peptide"
DTSKLAS

SEQ ID NO: 2123 - protein, 9 aa, Artificial Sequence
  source: /note="Description of Artificial Sequence: Synthetic peptide"
FQGSGYPFT

SEQ ID NO: 2124 - protein, 6 aa, Artificial Sequence
  source: /note="Description of Artificial Sequence: Synthetic peptide"
QLSVGY

SEQ ID NO: 2125 - protein, 3 aa, Artificial Sequence
  source: /note="Description of Artificial Sequence: Synthetic peptide"
DTS

SEQ ID NO: 2126 - protein, 6 aa, Artificial Sequence
  source: /note="Description of Artificial Sequence: Synthetic peptide"
GSGYPF

SEQ ID NO: 2127 - protein, 106 aa, Artificial Sequence; identical to SEQ ID NO: 15
  source: /note="Description of Artificial Sequence: Synthetic polypeptide"

SEQ ID NO: 2128 - protein, 213 aa, Artificial Sequence; identical to SEQ ID NO: 16
  source: /note="Description of Artificial Sequence: Synthetic polypeptide"

SEQ ID NO: 2129 - protein, 7 aa, Artificial Sequence
  source: /note="Description of Artificial Sequence: Synthetic peptide"
TSGMSVG

SEQ ID NO: 2130 - protein, 147 aa, Artificial Sequence
  source: /note="Description of Artificial Sequence: Synthetic polypeptide"
DIWWDYDFTNCDFEKIKAAYLSTISKDLITYMSGTKSTEFNNTVSCSNRPHCLTEIQSLTFNPTAGCASLAKEMFAMKTKAALAIWCPGYSETQINATQAMKKRRKRKVTTNKCLEQVSQLQGLWRRFNRPLLKQQDKKDYNPSLKS

SEQ ID NO: 2131 - protein, 10 aa, Artificial Sequence
  source: /note="Description of Artificial Sequence: Synthetic peptide"
SMITNWYFDV

SEQ ID NO: 2132 - protein, 9 aa, Artificial Sequence
  source: /note="Description of Artificial Sequence: Synthetic peptide"
GFSLSTSGM

SEQ ID NO: 2133 - protein, 136 aa, Artificial Sequence
  source: /note="Description of Artificial Sequence: Synthetic polypeptide"
WWDYDFTNCDFEKIKAAYLSTISKDLITYMSGTKSTEFNNTVSCSNRPHCLTEIQSLTFNPTAGCASLAKEMFAMKTKAALAIWCPGYSETQINATQAMKKRRKRKVTTNKCLEQVSQLQGLWRRFNRPLLKQQDK

SEQ ID NO: 2134 - protein, 10 aa, Artificial Sequence
  source: /note="Description of Artificial Sequence: Synthetic peptide"
SMITNWYFDV

SEQ ID NO: 2135 - protein, 251 aa, Artificial Sequence
  source: /note="Description of Artificial Sequence: Synthetic polypeptide"
QVTLRESGPALVKPTQTLTLTCTFSGFSLSTSGMSVGWIRQPPGKALEWLADIWWDYDFTNCDFEKIKAAYLSTISKDLITYMSGTKSTEFNNTVSCSNRPHCLTEIQSLTFNPTAGCASLAKEMFAMKTKAALAIWCPGYSETQINATQAMKKRRKRKVTTNKCLEQVSQLQGLWRRFNRPLLKQQDKKDYNPSLKSRLTISKDTSKNQVVLKVTNMDPADTATYYCARSMITNWYFDVWGAGTTVTVSS

SEQ ID NO: 2136 - protein, 581 aa, Artificial Sequence
  source: /note="Description of Artificial Sequence: Synthetic polypeptide"
QVTLRESGPALVKPTQTLTLTCTFSGFSLSTSGMSVGWIRQPPGKALEWLADIWWDYDFTNCDFEKIKAAYLSTISKDLITYMSGTKSTEFNNTVSCSNRPHCLTEIQSLTFNPTAGCASLAKEMFAMKTKAALAIWCPGYSETQINATQAMKKRRKRKVTTNKCLEQVSQLQGLWRRFNRPLLKQQDKKDYNPSLKSRLTISKDTSKNQVVLKVTNMDPADTATYYCARSMITNWYFDVWGAGTTVTVSSASTKGPSVFPLAPSSKSTSGGTAALGCLVKDYFPEPVTVSWNSGALTSGVHTFPAVLQSSGLYSLSSVVTVPSSSLGTQTYICNVNHKPSNTKVDKRVEPKSCDKTHTCPPCPAPELLGGPSVFLFPPKPKDTLMISRTPEVTCVVVAVSHEDPEVKFNWYVDGVEVHNAKTKPREEQYNSTYRVVSVLTVLHQDWLNGKEYKCKVSNKALAAPIEKTISKAKGQPREPQVYTLPPSREEMTKNQVSLTCLVKGFYPSDIAVEWESNGQPENNYKTTPPVLDSDGSFFLYSKLTVDKSRWQQGNVFSCSVMHEALHNHYTQKSLSLSPGK

SEQ ID NO: 2137 - protein, 10 aa, Artificial Sequence
  source: /note="Description of Artificial Sequence: Synthetic peptide"
KAQLSVGYMH

SEQ ID NO: 2138 - protein, 7 aa, Artificial Sequence
  source: /note="Description of Artificial Sequence: Synthetic peptide"
DTSKLAS

SEQ ID NO: 2139 - protein, 9 aa, Artificial Sequence
  source: /note="Description of Artificial Sequence: Synthetic peptide"
FQGSGYPFT

SEQ ID NO: 2140 - protein, 6 aa, Artificial Sequence
  source: /note="Description of Artificial Sequence: Synthetic peptide"
QLSVGY

SEQ ID NO: 2141 - protein, 3 aa, Artificial Sequence
  source: /note="Description of Artificial Sequence: Synthetic peptide"
DTS

SEQ ID NO: 2142 - protein, 6 aa, Artificial Sequence
  source: /note="Description of Artificial Sequence: Synthetic peptide"
GSGYPF

SEQ ID NO: 2143 - protein, 106 aa, Artificial Sequence; identical to SEQ ID NO: 15
  source: /note="Description of Artificial Sequence: Synthetic polypeptide"

SEQ ID NO: 2144 - protein, 213 aa, Artificial Sequence; identical to SEQ ID NO: 16
  source: /note="Description of Artificial Sequence: Synthetic polypeptide"

SEQ ID NO: 2145 - protein, 7 aa, Artificial Sequence
  source: /note="Description of Artificial Sequence: Synthetic peptide"
TSGMSVG

SEQ ID NO: 2146 - protein, 16 aa, Artificial Sequence
  source: /note="Description of Artificial Sequence: Synthetic peptide"
DIWWDDKKDYNPSLKS

SEQ ID NO: 2147 - protein, 141 aa, Artificial Sequence
  source: /note="Description of Artificial Sequence: Synthetic polypeptide"
SMITYDFTNCDFEKIKAAYLSTISKDLITYMSGTKSTEFNNTVSCSNRPHCLTEIQSLTFNPTAGCASLAKEMFAMKTKAALAIWCPGYSETQINATQAMKKRRKRKVTTNKCLEQVSQLQGLWRRFNRPLLKQQNWYFDV

SEQ ID NO: 2148 - protein, 9 aa, Artificial Sequence
  source: /note="Description of Artificial Sequence: Synthetic peptide"
GFSLSTSGM

SEQ ID NO: 2149 - protein, 5 aa, Artificial Sequence
  source: /note="Description of Artificial Sequence: Synthetic peptide"
WWDDK

SEQ ID NO: 2150 - protein, 141 aa, Artificial Sequence; identical to SEQ ID NO: 2147
  source: /note="Description of Artificial Sequence: Synthetic polypeptide"

SEQ ID NO: 2151 - protein, 251 aa, Artificial Sequence
  source: /note="Description of Artificial Sequence: Synthetic polypeptide"
QVTLRESGPALVKPTQTLTLTCTFSGFSLSTSGMSVGWIRQPPGKALEWLADIWWDDKKDYNPSLKSRLTISKDTSKNQVVLKVTNMDPADTATYYCARSMITYDFTNCDFEKIKAAYLSTISKDLITYMSGTKSTEFNNTVSCSNRPHCLTEIQSLTFNPTAGCASLAKEMFAMKTKAALAIWCPGYSETQINATQAMKKRRKRKVTTNKCLEQVSQLQGLWRRFNRPLLKQQNWYFDVWGAGTTVTVSS

SEQ ID NO: 2152 - protein, 581 aa, Artificial Sequence
  source: /note="Description of Artificial Sequence: Synthetic polypeptide"
QVTLRESGPALVKPTQTLTLTCTFSGFSLSTSGMSVGWIRQPPGKALEWLADIWWDDKKDYNPSLKSRLTISKDTSKNQVVLKVTNMDPADTATYYCARSMITYDFTNCDFEKIKAAYLSTISKDLITYMSGTKSTEFNNTVSCSNRPHCLTEIQSLTFNPTAGCASLAKEMFAMKTKAALAIWCPGYSETQINATQAMKKRRKRKVTTNKCLEQVSQLQGLWRRFNRPLLKQQNWYFDVWGAGTTVTVSSASTKGPSVFPLAPSSKSTSGGTAALGCLVKDYFPEPVTVSWNSGALTSGVHTFPAVLQSSGLYSLSSVVTVPSSSLGTQTYICNVNHKPSNTKVDKRVEPKSCDKTHTCPPCPAPELLGGPSVFLFPPKPKDTLMISRTPEVTCVVVAVSHEDPEVKFNWYVDGVEVHNAKTKPREEQYNSTYRVVSVLTVLHQDWLNGKEYKCKVSNKALAAPIEKTISKAKGQPREPQVYTLPPSREEMTKNQVSLTCLVKGFYPSDIAVEWESNGQPENNYKTTPPVLDSDGSFFLYSKLTVDKSRWQQGNVFSCSVMHEALHNHYTQKSLSLSPGK

SEQ ID NO: 2153 - protein, 10 aa, Artificial Sequence
  source: /note="Description of Artificial Sequence: Synthetic peptide"
KAQLSVGYMH

SEQ ID NO: 2154 - protein, 7 aa, Artificial Sequence
  source: /note="Description of Artificial Sequence: Synthetic peptide"
DTSKLAS

SEQ ID NO: 2155 - protein, 9 aa, Artificial Sequence
  source: /note="Description of Artificial Sequence: Synthetic peptide"
FQGSGYPFT

SEQ ID NO: 2156 - protein, 6 aa, Artificial Sequence
  source: /note="Description of Artificial Sequence: Synthetic peptide"
QLSVGY

SEQ ID NO: 2157 - protein, 3 aa, Artificial Sequence
  source: /note="Description of Artificial Sequence: Synthetic peptide"
DTS

SEQ ID NO: 2158 - protein, 6 aa, Artificial Sequence
  source: /note="Description of Artificial Sequence: Synthetic peptide"
GSGYPF

SEQ ID NO: 2159 - protein, 106 aa, Artificial Sequence; identical to SEQ ID NO: 15
  source: /note="Description of Artificial Sequence: Synthetic polypeptide"

SEQ ID NO: 2160 - protein, 213 aa, Artificial Sequence; identical to SEQ ID NO: 16
  source: /note="Description of Artificial Sequence: Synthetic polypeptide"

SEQ ID NO: 2161 - protein, 7 aa, Artificial Sequence
  source: /note="Description of Artificial Sequence: Synthetic peptide"
TSGMSVG

SEQ ID NO: 2162 - protein, 15 aa, Artificial Sequence
  source: /note="Description of Artificial Sequence: Synthetic peptide"
DIWWDDKKDYNPSLK

SEQ ID NO: 2163 - protein, 10 aa, Artificial Sequence
  source: /note="Description of Artificial Sequence: Synthetic peptide"
SMITNWYFDV

SEQ ID NO: 2164 - protein, 9 aa, Artificial Sequence
  source: /note="Description of Artificial Sequence: Synthetic peptide"
GFSLSTSGM

SEQ ID NO: 2165 - protein, 5 aa, Artificial Sequence
  source: /note="Description of Artificial Sequence: Synthetic peptide"
WWDDK

SEQ ID NO: 2166 - protein, 10 aa, Artificial Sequence
  source: /note="Description of Artificial Sequence: Synthetic peptide"
SMITNWYFDV

SEQ ID NO: 2167 - protein, 120 aa, Artificial Sequence; identical to SEQ ID NO: 55
  source: /note="Description of Artificial Sequence: Synthetic polypeptide"

SEQ ID NO: 2168 - protein, 450 aa, Artificial Sequence; identical to SEQ ID NO: 56
  source: /note="Description of Artificial Sequence: Synthetic polypeptide"

SEQ ID NO: 2169 - protein, 141 aa, Artificial Sequence
  source: /note="Description of Artificial Sequence: Synthetic polypeptide"
KAQLSYDFTNCDFEKIKAAYLSTISKDLITYMSGTKSTEFNNTVSCSNRPHCLTEIQSLTFNPTAGCASLAKEMFAMKTKAALAIWCPGYSETQINATQAMKKRRKRKVTTNKCLEQVSQLQGLWRRFNRPLLKQQVGYMH

SEQ ID NO: 2170 - protein, 7 aa, Artificial Sequence
  source: /note="Description of Artificial Sequence: Synthetic peptide"
DTSKLAS

SEQ ID NO: 2171 - protein, 9 aa, Artificial Sequence
  source: /note="Description of Artificial Sequence: Synthetic peptide"
FQGSGYPFT

SEQ ID NO: 2172 - protein, 137 aa, Artificial Sequence
  source: /note="Description of Artificial Sequence: Synthetic polypeptide"
QLSYDFTNCDFEKIKAAYLSTISKDLITYMSGTKSTEFNNTVSCSNRPHCLTEIQSLTFNPTAGCASLAKEMFAMKTKAALAIWCPGYSETQINATQAMKKRRKRKVTTNKCLEQVSQLQGLWRRFNRPLLKQQVGY

SEQ ID NO: 2173 - protein, 3 aa, Artificial Sequence
  source: /note="Description of Artificial Sequence: Synthetic peptide"
DTS

SEQ ID NO: 2174 - protein, 6 aa, Artificial Sequence
  source: /note="Description of Artificial Sequence: Synthetic peptide"
GSGYPF

SEQ ID NO: 2175 - protein, 237 aa, Artificial Sequence
  source: /note="Description of Artificial Sequence: Synthetic polypeptide"
DIQMTQSPSTLSASVGDRVTITCKAQLSYDFTNCDFEKIKAAYLSTISKDLITYMSGTKSTEFNNTVSCSNRPHCLTEIQSLTFNPTAGCASLAKEMFAMKTKAALAIWCPGYSETQINATQAMKKRRKRKVTTNKCLEQVSQLQGLWRRFNRPLLKQQVGYMHWYQQKPGKAPKLLIYDTSKLASGVPSRFSGSGSGTEFTLTISSLQPDDFATYYCFQGSGYPFTFGGGTKLEIK

SEQ ID NO: 2176 - protein, 344 aa, Artificial Sequence
  source: /note="Description of Artificial Sequence: Synthetic polypeptide"
DIQMTQSPSTLSASVGDRVTITCKAQLSYDFTNCDFEKIKAAYLSTISKDLITYMSGTKSTEFNNTVSCSNRPHCLTEIQSLTFNPTAGCASLAKEMFAMKTKAALAIWCPGYSETQINATQAMKKRRKRKVTTNKCLEQVSQLQGLWRRFNRPLLKQQVGYMHWYQQKPGKAPKLLIYDTSKLASGVPSRFSGSGSGTEFTLTISSLQPDDFATYYCFQGSGYPFTFGGGTKLEIKRTVAAPSVFIFPPSDEQLKSGTASVVCLLNNFYPREAKVQWKVDNALQSGNSQESVTEQDSKDSTYSLSSTLTLSKADYEKHKVYACEVTHQGLSSPVTKSFNRGEC

SEQ ID NO: 2177 - protein, 7 aa, Artificial Sequence
  source: /note="Description of Artificial Sequence: Synthetic peptide"
TSGMSVG

SEQ ID NO: 2178 - protein, 15 aa, Artificial Sequence
  source: /note="Description of Artificial Sequence: Synthetic peptide"
DIWWDDKKDYNPSLK

SEQ ID NO: 2179 - protein, 10 aa, Artificial Sequence
  source: /note="Description of Artificial Sequence: Synthetic peptide"
SMITNWYFDV

SEQ ID NO: 2180 - protein, 9 aa, Artificial Sequence
  source: /note="Description of Artificial Sequence: Synthetic peptide"
GFSLSTSGM

SEQ ID NO: 2181 - protein, 5 aa, Artificial Sequence
  source: /note="Description of Artificial Sequence: Synthetic peptide"
WWDDK

SEQ ID NO: 2182 - protein, 10 aa, Artificial Sequence
  source: /note="Description of Artificial Sequence: Synthetic peptide"
SMITNWYFDV

SEQ ID NO: 2183 - protein, 120 aa, Artificial Sequence; identical to SEQ ID NO: 55
  source: /note="Description of Artificial Sequence: Synthetic polypeptide"

SEQ ID NO: 2184 - protein, 450 aa, Artificial Sequence; identical to SEQ ID NO: 56
  source: /note="Description of Artificial Sequence: Synthetic polypeptide"

SEQ ID NO: 2185 - protein, 10 aa, Artificial Sequence
  source: /note="Description of Artificial Sequence: Synthetic peptide"
KAQLSVGYMH

SEQ ID NO: 2186 - protein, 138 aa, Artificial Sequence
  source: /note="Description of Artificial Sequence: Synthetic polypeptide"
DTYDFTNCDFEKIKAAYLSTISKDLITYMSGTKSTEFNNTVSCSNRPHCLTEIQSLTFNPTAGCASLAKEMFAMKTKAALAIWCPGYSETQINATQAMKKRRKRKVTTNKCLEQVSQLQGLWRRFNRPLLKQQSKLAS

SEQ ID NO: 2187 - protein, 9 aa, Artificial Sequence
  source: /note="Description of Artificial Sequence: Synthetic peptide"
FQGSGYPFT

SEQ ID NO: 2188 - protein, 6 aa, Artificial Sequence
  source: /note="Description of Artificial Sequence: Synthetic peptide"
QLSVGY

SEQ ID NO: 2189 - protein, 134 aa, Artificial Sequence
  source: /note="Description of Artificial Sequence: Synthetic polypeptide"
DTYDFTNCDFEKIKAAYLSTISKDLITYMSGTKSTEFNNTVSCSNRPHCLTEIQSLTFNPTAGCASLAKEMFAMKTKAALAIWCPGYSETQINATQAMKKRRKRKVTTNKCLEQVSQLQGLWRRFNRPLLKQQS

SEQ ID NO: 2190 - protein, 6 aa, Artificial Sequence
  source: /note="Description of Artificial Sequence: Synthetic peptide"
GSGYPF

SEQ ID NO: 2191 - protein, 237 aa, Artificial Sequence
  source: /note="Description of Artificial Sequence: Synthetic polypeptide"
DIQMTQSPSTLSASVGDRVTITCKAQLSVGYMHWYQQKPGKAPKLLIYDTYDFTNCDFEKIKAAYLSTISKDLITYMSGTKSTEFNNTVSCSNRPHCLTEIQSLTFNPTAGCASLAKEMFAMKTKAALAIWCPGYSETQINATQAMKKRRKRKVTTNKCLEQVSQLQGLWRRFNRPLLKQQSKLASGVPSRFSGSGSGTEFTLTISSLQPDDFATYYCFQGSGYPFTFGGGTKLEIK

SEQ ID NO: 2192 - protein, 344 aa, Artificial Sequence
  source: /note="Description of Artificial Sequence: Synthetic polypeptide"
DIQMTQSPSTLSASVGDRVTITCKAQLSVGYMHWYQQKPGKAPKLLIYDTYDFTNCDFEKIKAAYLSTISKDLITYMSGTKSTEFNNTVSCSNRPHCLTEIQSLTFNPTAGCASLAKEMFAMKTKAALAIWCPGYSETQINATQAMKKRRKRKVTTNKCLEQVSQLQGLWRRFNRPLLKQQSKLASGVPSRFSGSGSGTEFTLTISSLQPDDFATYYCFQGSGYPFTFGGGTKLEIKRTVAAPSVFIFPPSDEQLKSGTASVVCLLNNFYPREAKVQWKVDNALQSGNSQESVTEQDSKDSTYSLSSTLTLSKADYEKHKVYACEVTHQGLSSPVTKSFNRGEC

SEQ ID NO: 2193 - protein, 7 aa, Artificial Sequence
  source: /note="Description of Artificial Sequence: Synthetic peptide"
TSGMSVG

SEQ ID NO: 2194 - protein, 15 aa, Artificial Sequence
  source: /note="Description of Artificial Sequence: Synthetic peptide"
DIWWDDKKDYNPSLK

SEQ ID NO: 2195 - protein, 10 aa, Artificial Sequence
  source: /note="Description of Artificial Sequence: Synthetic peptide"
SMITNWYFDV

SEQ ID NO: 2196 - protein, 9 aa, Artificial Sequence
  source: /note="Description of Artificial Sequence: Synthetic peptide"
GFSLSTSGM

SEQ ID NO: 2197 - protein, 5 aa, Artificial Sequence
  source: /note="Description of Artificial Sequence: Synthetic peptide"
WWDDK

SEQ ID NO: 2198 - protein, 10 aa, Artificial Sequence
  source: /note="Description of Artificial Sequence: Synthetic peptide"
SMITNWYFDV

SEQ ID NO: 2199 - protein, 120 aa, Artificial Sequence; identical to SEQ ID NO: 55
  source: /note="Description of Artificial Sequence: Synthetic polypeptide"

SEQ ID NO: 2200 - protein, 450 aa, Artificial Sequence; identical to SEQ ID NO: 56
  source: /note="Description of Artificial Sequence: Synthetic polypeptide"

SEQ ID NO: 2201 - protein, 10 aa, Artificial Sequence
  source: /note="Description of Artificial Sequence: Synthetic peptide"
KAQLSVGYMH

SEQ ID NO: 2202 - protein, 7 aa, Artificial Sequence
  source: /note="Description of Artificial Sequence: Synthetic peptide"
DTSKLAS

SEQ ID NO: 2203 - protein, 140 aa, Artificial Sequence
  source: /note="Description of Artificial Sequence: Synthetic polypeptide"
FQGSGYDFTNCDFEKIKAAYLSTISKDLITYMSGTKSTEFNNTVSCSNRPHCLTEIQSLTFNPTAGCASLAKEMFAMKTKAALAIWCPGYSETQINATQAMKKRRKRKVTTNKCLEQVSQLQGLWRRFNRPLLKQQYPFT

SEQ ID NO: 2204 - protein, 6 aa, Artificial Sequence
  source: /note="Description of Artificial Sequence: Synthetic peptide"
QLSVGY

SEQ ID NO: 2205 - protein, 3 aa, Artificial Sequence
  source: /note="Description of Artificial Sequence: Synthetic peptide"
DTS

SEQ ID NO: 2206 - protein, 137 aa, Artificial Sequence
  source: /note="Description of Artificial Sequence: Synthetic polypeptide"
GSGYDFTNCDFEKIKAAYLSTISKDLITYMSGTKSTEFNNTVSCSNRPHCLTEIQSLTFNPTAGCASLAKEMFAMKTKAALAIWCPGYSETQINATQAMKKRRKRKVTTNKCLEQVSQLQGLWRRFNRPLLKQQYPF

SEQ ID NO: 2207 - protein, 237 aa, Artificial Sequence
  source: /note="Description of Artificial Sequence: Synthetic polypeptide"
DIQMTQSPSTLSASVGDRVTITCKAQLSVGYMHWYQQKPGKAPKLLIYDTSKLASGVPSRFSGSGSGTEFTLTISSLQPDDFATYYCFQGSGYDFTNCDFEKIKAAYLSTISKDLITYMSGTKSTEFNNTVSCSNRPHCLTEIQSLTFNPTAGCASLAKEMFAMKTKAALAIWCPGYSETQINATQAMKKRRKRKVTTNKCLEQVSQLQGLWRRFNRPLLKQQYPFTFGGGTKLEIK

SEQ ID NO: 2208 - protein, 344 aa, Artificial Sequence
  source: /note="Description of Artificial Sequence: Synthetic polypeptide"
DIQMTQSPSTLSASVGDRVTITCKAQLSVGYMHWYQQKPGKAPKLLIYDTSKLASGVPSRFSGSGSGTEFTLTISSLQPDDFATYYCFQGSGYDFTNCDFEKIKAAYLSTISKDLITYMSGTKSTEFNNTVSCSNRPHCLTEIQSLTFNPTAGCASLAKEMFAMKTKAALAIWCPGYSETQINATQAMKKRRKRKVTTNKCLEQVSQLQGLWRRFNRPLLKQQYPFTFGGGTKLEIKRTVAAPSVFIFPPSDEQLKSGTASVVCLLNNFYPREAKVQWKVDNALQSGNSQESVTEQDSKDSTYSLSSTLTLSKADYEKHKVYACEVTHQGLSSPVTKSFNRGEC

SEQ ID NO: 2209 - protein, 122 aa, Artificial Sequence
  source: /note="Description of Artificial Sequence: Synthetic polypeptide"
PTEIPTSALVKETLALLSTHRTLLIANETLRIPVPVHKNHQLCTEEIFQGIGTLESQTVQGGTVERLFKNLSLIKKYIDGQKKKCGEERRRVNQFLDYLQEFLGVMNTEWIIESSTSGMSVG

SEQ ID NO: 2210 - protein, 16 aa, Artificial Sequence
  source: /note="Description of Artificial Sequence: Synthetic peptide"
DIWWDDKKDYNPSLKS

SEQ ID NO: 2211 - protein, 10 aa, Artificial Sequence
  source: /note="Description of Artificial Sequence: Synthetic peptide"
SMITNWYFDV

SEQ ID NO: 2212 - protein, 124 aa, Artificial Sequence
  source: /note="Description of Artificial Sequence: Synthetic polypeptide"
GFSLIPTEIPTSALVKETLALLSTHRTLLIANETLRIPVPVHKNHQLCTEEIFQGIGTLESQTVQGGTVERLFKNLSLIKKYIDGQKKKCGEERRRVNQFLDYLQEFLGVMNTEWIIESSTSGM

SEQ ID NO: 2213 - protein, 5 aa, Artificial Sequence
  source: /note="Description of Artificial Sequence: Synthetic peptide"
WWDDK

SEQ ID NO: 2214 - protein, 10 aa, Artificial Sequence
  source: /note="Description of Artificial Sequence: Synthetic peptide"
SMITNWYFDV

SEQ ID NO: 2215 - protein, 235 aa, Artificial Sequence
  source: /note="Description of Artificial Sequence: Synthetic polypeptide"
QVTLRESGPALVKPTQTLTLTCTFSGFSLIPTEIPTSALVKETLALLSTHRTLLIANETLRIPVPVHKNHQLCTEEIFQGIGTLESQTVQGGTVERLFKNLSLIKKYIDGQKKKCGEERRRVNQFLDYLQEFLGVMNTEWIIESSTSGMSVGWIRQPPGKALEWLADIWWDDKKDYNPSLKSRLTISKDTSKNQVVLKVTNMDPADTATYYCARSMITNWYFDVWGAGTTVTVSS

SEQ ID NO: 2216 - protein, 565 aa, Artificial Sequence
  source: /note="Description of Artificial Sequence: Synthetic polypeptide"
QVTLRESGPALVKPTQTLTLTCTFSGFSLIPTEIPTSALVKETLALLSTHRTLLIANETLRIPVPVHKNHQLCTEEIFQGIGTLESQTVQGGTVERLFKNLSLIKKYIDGQKKKCGEERRRVNQFLDYLQEFLGVMNTEWIIESSTSGMSVGWIRQPPGKALEWLADIWWDDKKDYNPSLKSRLTISKDTSKNQVVLKVTNMDPADTATYYCARSMITNWYFDVWGAGTTVTVSSASTKGPSVFPLAPSSKSTSGGTAALGCLVKDYFPEPVTVSWNSGALTSGVHTFPAVLQSSGLYSLSSVVTVPSSSLGTQTYICNVNHKPSNTKVDKRVEPKSCDKTHTCPPCPAPELLGGPSVFLFPPKPKDTLMISRTPEVTCVVVAVSHEDPEVKFNWYVDGVEVHNAKTKPREEQYNSTYRVVSVLTVLHQDWLNGKEYKCKVSNKALAAPIEKTISKAKGQPREPQVYTLPPSREEMTKNQVSLTCLVKGFYPSDIAVEWESNGQPENNYKTTPPVLDSDGSFFLYSKLTVDKSRWQQGNVFSCSVMHEALHNHYTQKSLSLSPGK

SEQ ID NO: 2217 - protein, 10 aa, Artificial Sequence
  source: /note="Description of Artificial Sequence: Synthetic peptide"
KAQLSVGYMH

SEQ ID NO: 2218 - protein, 7 aa, Artificial Sequence
  source: /note="Description of Artificial Sequence: Synthetic peptide"
DTSKLAS

SEQ ID NO: 2219 - protein, 9 aa, Artificial Sequence
  source: /note="Description of Artificial Sequence: Synthetic peptide"
FQGSGYPFT

SEQ ID NO: 2220 - protein, 6 aa, Artificial Sequence
  source: /note="Description of Artificial Sequence: Synthetic peptide"
QLSVGY

SEQ ID NO: 2221 - protein, 3 aa, Artificial Sequence
  source: /note="Description of Artificial Sequence: Synthetic peptide"
DTS

SEQ ID NO: 2222 - protein, 6 aa, Artificial Sequence
  source: /note="Description of Artificial Sequence: Synthetic peptide"
GSGYPF

SEQ ID NO: 2223 - protein, 106 aa, Artificial Sequence; identical to SEQ ID NO: 15
  source: /note="Description of Artificial Sequence: Synthetic polypeptide"

SEQ ID NO: 2224 - protein, 213 aa, Artificial Sequence; identical to SEQ ID NO: 16
  source: /note="Description of Artificial Sequence: Synthetic polypeptide"

SEQ ID NO: 2225 - protein, 7 aa, Artificial Sequence
  source: /note="Description of Artificial Sequence: Synthetic peptide"
TSGMSVG

SEQ ID NO: 2226 - protein, 131 aa, Artificial Sequence
  source: /note="Description of Artificial Sequence: Synthetic polypeptide"
DIWWDIPTEIPTSALVKETLALLSTHRTLLIANETLRIPVPVHKNHQLCTEEIFQGIGTLESQTVQGGTVERLFKNLSLIKKYIDGQKKKCGEERRRVNQFLDYLQEFLGVMNTEWIIESDKKDYNPSLKS

SEQ ID NO: 2227 - protein, 10 aa, Artificial Sequence
  source: /note="Description of Artificial Sequence: Synthetic peptide"
SMITNWYFDV

SEQ ID NO: 2228 - protein, 9 aa, Artificial Sequence
  source: /note="Description of Artificial Sequence: Synthetic peptide"
GFSLSTSGM

SEQ ID NO: 2229 - protein, 120 aa, Artificial Sequence
  source: /note="Description of Artificial Sequence: Synthetic polypeptide"
WWDIPTEIPTSALVKETLALLSTHRTLLIANETLRIPVPVHKNHQLCTEEIFQGIGTLESQTVQGGTVERLFKNLSLIKKYIDGQKKKCGEERRRVNQFLDYLQEFLGVMNTEWIIESDK

SEQ ID NO: 2230 - protein, 10 aa, Artificial Sequence
  source: /note="Description of Artificial Sequence: Synthetic peptide"
SMITNWYFDV

SEQ ID NO: 2231 - protein, 235 aa, Artificial Sequence
  source: /note="Description of Artificial Sequence: Synthetic polypeptide"
QVTLRESGPALVKPTQTLTLTCTFSGFSLSTSGMSVGWIRQPPGKALEWLADIWWDIPTEIPTSALVKETLALLSTHRTLLIANETLRIPVPVHKNHQLCTEEIFQGIGTLESQTVQGGTVERLFKNLSLIKKYIDGQKKKCGEERRRVNQFLDYLQEFLGVMNTEWIIESDKKDYNPSLKSRLTISKDTSKNQVVLKVTNMDPADTATYYCARSMITNWYFDVWGAGTTVTVSS

SEQ ID NO: 2232 - protein, 565 aa, Artificial Sequence
  source: /note="Description of Artificial Sequence: Synthetic polypeptide"
QVTLRESGPALVKPTQTLTLTCTFSGFSLSTSGMSVGWIRQPPGKALEWLADIWWDIPTEIPTSALVKETLALLSTHRTLLIANETLRIPVPVHKNHQLCTEEIFQGIGTLESQTVQGGTVERLFKNLSLIKKYIDGQKKKCGEERRRVNQFLDYLQEFLGVMNTEWIIESDKKDYNPSLKSRLTISKDTSKNQVVLKVTNMDPADTATYYCARSMITNWYFDVWGAGTTVTVSSASTKGPSVFPLAPSSKSTSGGTAALGCLVKDYFPEPVTVSWNSGALTSGVHTFPAVLQSSGLYSLSSVVTVPSSSLGTQTYICNVNHKPSNTKVDKRVEPKSCDKTHTCPPCPAPELLGGPSVFLFPPKPKDTLMISRTPEVTCVVVAVSHEDPEVKFNWYVDGVEVHNAKTKPREEQYNSTYRVVSVLTVLHQDWLNGKEYKCKVSNKALAAPIEKTISKAKGQPREPQVYTLPPSREEMTKNQVSLTCLVKGFYPSDIAVEWESNGQPENNYKTTPPVLDSDGSFFLYSKLTVDKSRWQQGNVFSCSVMHEALHNHYTQKSLSLSPGK

SEQ ID NO: 2233 - protein, 10 aa, Artificial Sequence
  source: /note="Description of Artificial Sequence: Synthetic peptide"
KAQLSVGYMH

SEQ ID NO: 2234 - protein, 7 aa, Artificial Sequence
  source: /note="Description of Artificial Sequence: Synthetic peptide"
DTSKLAS

SEQ ID NO: 2235 - protein, 9 aa, Artificial Sequence
  source: /note="Description of Artificial Sequence: Synthetic peptide"
FQGSGYPFT

SEQ ID NO: 2236 - protein, 6 aa, Artificial Sequence
  source: /note="Description of Artificial Sequence: Synthetic peptide"
QLSVGY

SEQ ID NO: 2237 - protein, 3 aa, Artificial Sequence
  source: /note="Description of Artificial Sequence: Synthetic peptide"
DTS

SEQ ID NO: 2238 - protein, 6 aa, Artificial Sequence
  source: /note="Description of Artificial Sequence: Synthetic peptide"
GSGYPF

SEQ ID NO: 2239 - protein, 106 aa, Artificial Sequence; identical to SEQ ID NO: 15
  source: /note="Description of Artificial Sequence: Synthetic polypeptide"

SEQ ID NO: 2240 - protein, 213 aa, Artificial Sequence; identical to SEQ ID NO: 16
  source: /note="Description of Artificial Sequence: Synthetic polypeptide"

SEQ ID NO: 2241 - protein, 7 aa, Artificial Sequence
  source: /note="Description of Artificial Sequence: Synthetic peptide"
TSGMSVG

SEQ ID NO: 2242 - protein, 131 aa, Artificial Sequence; identical to SEQ ID NO: 2226
  source: /note="Description of Artificial Sequence: Synthetic polypeptide"

SEQ ID NO: 2243 - protein, 10 aa, Artificial Sequence
  source: /note="Description of Artificial Sequence: Synthetic peptide"
SMITNWYFDV

SEQ ID NO: 2244 - protein, 9 aa, Artificial Sequence
  source: /note="Description of Artificial Sequence: Synthetic peptide"
GFSLSTSGM

SEQ ID NO: 2245 - protein, 120 aa, Artificial Sequence; identical to SEQ ID NO: 2229
  source: /note="Description of Artificial Sequence: Synthetic polypeptide"

SEQ ID NO: 2246 - protein, 10 aa, Artificial Sequence
  source: /note="Description of Artificial Sequence: Synthetic peptide"
SMITNWYFDV

SEQ ID NO: 2247 - protein, 235 aa, Artificial Sequence
  source: /note="Description of Artificial Sequence: Synthetic polypeptide"
QVTLRESGPALVKPTQTLTLTCTFSGFSLSTSGMSVGWIRQPPGKALEWLADIWWDIPTEIPTSALVKETLALLSTHRTLLIANETLRIPVPVHKNHQLCTEEIFQGIGTLESQTVQGGTVERLFKNLSLIKKYIDGQKKKCGEERRRVNQFLDYLQEFLGVMNTEWIIESDKKDYNPSLKSRLTISKDTSANQVVLKVTNMDPADTATYYCARSMITNWYFDVWGAGTTVTVSS

SEQ ID NO: 2248 - protein, 565 aa, Artificial Sequence
  source: /note="Description of Artificial Sequence: Synthetic polypeptide"
QVTLRESGPALVKPTQTLTLTCTFSGFSLSTSGMSVGWIRQPPGKALEWLADIWWDIPTEIPTSALVKETLALLSTHRTLLIANETLRIPVPVHKNHQLCTEEIFQGIGTLESQTVQGGTVERLFKNLSLIKKYIDGQKKKCGEERRRVNQFLDYLQEFLGVMNTEWIIESDKKDYNPSLKSRLTISKDTSANQVVLKVTNMDPADTATYYCARSMITNWYFDVWGAGTTVTVSSASTKGPSVFPLAPSSKSTSGGTAALGCLVKDYFPEPVTVSWNSGALTSGVHTFPAVLQSSGLYSLSSVVTVPSSSLGTQTYICNVNHKPSNTKVDKRVEPKSCDKTHTCPPCPAPELLGGPSVFLFPPKPKDTLMISRTPEVTCVVVAVSHEDPEVKFNWYVDGVEVHNAKTKPREEQYNSTYRVVSVLTVLHQDWLNGKEYKCKVSNKALAAPIEKTISKAKGQPREPQVYTLPPSREEMTKNQVSLTCLVKGFYPSDIAVEWESNGQPENNYKTTPPVLDSDGSFFLYSKLTVDKSRWQQGNVFSCSVMHEALHNHYTQKSLSLSPGK

SEQ ID NO: 2249 - protein, 10 aa, Artificial Sequence
  source: /note="Description of Artificial Sequence: Synthetic peptide"
KAQLSVGYMH

SEQ ID NO: 2250 - protein, 7 aa, Artificial Sequence
  source: /note="Description of Artificial Sequence: Synthetic peptide"
DTSKLAS

SEQ ID NO: 2251 - protein, 9 aa, Artificial Sequence
  source: /note="Description of Artificial Sequence: Synthetic peptide"
FQGSGYPFT

SEQ ID NO: 2252 - protein, 6 aa, Artificial Sequence
  source: /note="Description of Artificial Sequence: Synthetic peptide"
QLSVGY

SEQ ID NO: 2253 - protein, 3 aa, Artificial Sequence
  source: /note="Description of Artificial Sequence: Synthetic peptide"
DTS

SEQ ID NO: 2254 - protein, 6 aa, Artificial Sequence
  source: /note="Description of Artificial Sequence: Synthetic peptide"
GSGYPF

SEQ ID NO: 2255 - protein, 106 aa, Artificial Sequence; identical to SEQ ID NO: 15
  source: /note="Description of Artificial Sequence: Synthetic polypeptide"

SEQ ID NO: 2256 - protein, 213 aa, Artificial Sequence; identical to SEQ ID NO: 16
  source: /note="Description of Artificial Sequence: Synthetic polypeptide"

SEQ ID NO: 2257 - protein, 7 aa, Artificial Sequence
  source: /note="Description of Artificial Sequence: Synthetic peptide"
TSGMSVG

SEQ ID NO: 2258 - protein, 15 aa, Artificial Sequence
  source: /note="Description of Artificial Sequence: Synthetic peptide"
DIWWDDKKDYNPSLK

SEQ ID NO: 2259 - protein, 10 aa, Artificial Sequence
  source: /note="Description of Artificial Sequence: Synthetic peptide"
SMITNWYFDV

SEQ ID NO: 2260 - protein, 9 aa, Artificial Sequence
  source: /note="Description of Artificial Sequence: Synthetic peptide"
GFSLSTSGM

SEQ ID NO: 2261 - protein, 5 aa, Artificial Sequence
  source: /note="Description of Artificial Sequence: Synthetic peptide"
WWDDK

SEQ ID NO: 2262 - protein, 10 aa, Artificial Sequence
  source: /note="Description of Artificial Sequence: Synthetic peptide"
SMITNWYFDV

SEQ ID NO: 2263 - protein, 120 aa, Artificial Sequence; identical to SEQ ID NO: 55
  source: /note="Description of Artificial Sequence: Synthetic polypeptide"

SEQ ID NO: 2264 - protein, 450 aa, Artificial Sequence; identical to SEQ ID NO: 56
  source: /note="Description of Artificial Sequence: Synthetic polypeptide"

SEQ ID NO: 2265 - protein, 125 aa, Artificial Sequence
  source: /note="Description of Artificial Sequence: Synthetic polypeptide"
KAQLSIPTEIPTSALVKETLALLSTHRTLLIANETLRIPVPVHKNHQLCTEEIFQGIGTLESQTVQGGTVERLFKNLSLIKKYIDGQKKKCGEERRRVNQFLDYLQEFLGVMNTEWIIESVGYMH

SEQ ID NO: 2266 - protein, 7 aa, Artificial Sequence
  source: /note="Description of Artificial Sequence: Synthetic peptide"
DTSKLAS

SEQ ID NO: 2267 - protein, 9 aa, Artificial Sequence
  source: /note="Description of Artificial Sequence: Synthetic peptide"
FQGSGYPFT

SEQ ID NO: 2268 - protein, 121 aa, Artificial Sequence
  source: /note="Description of Artificial Sequence: Synthetic polypeptide"
QLSIPTEIPTSALVKETLALLSTHRTLLIANETLRIPVPVHKNHQLCTEEIFQGIGTLESQTVQGGTVERLFKNLSLIKKYIDGQKKKCGEERRRVNQFLDYLQEFLGVMNTEWIIESVGY

SEQ ID NO: 2269 - protein, 3 aa, Artificial Sequence
  source: /note="Description of Artificial Sequence: Synthetic peptide"
DTS

SEQ ID NO: 2270 - protein, 6 aa, Artificial Sequence
  source: /note="Description of Artificial Sequence: Synthetic peptide"
GSGYPF

SEQ ID NO: 2271 - protein, 221 aa, Artificial Sequence
  source: /note="Description of Artificial Sequence: Synthetic polypeptide"
DIQMTQSPSTLSASVGDRVTITCKAQLSIPTEIPTSALVKETLALLSTHRTLLIANETLRIPVPVHKNHQLCTEEIFQGIGTLESQTVQGGTVERLFKNLSLIKKYIDGQKKKCGEERRRVNQFLDYLQEFLGVMNTEWIIESVGYMHWYQQKPGKAPKLLIYDTSKLASGVPSRFSGSGSGTEFTLTISSLQPDDFATYYCFQGSGYPFTFGGGTKLEIK

SEQ ID NO: 2272 - protein, 328 aa, Artificial Sequence
  source: /note="Description of Artificial Sequence: Synthetic polypeptide"
DIQMTQSPSTLSASVGDRVTITCKAQLSIPTEIPTSALVKETLALLSTHRTLLIANETLRIPVPVHKNHQLCTEEIFQGIGTLESQTVQGGTVERLFKNLSLIKKYIDGQKKKCGEERRRVNQFLDYLQEFLGVMNTEWIIESVGYMHWYQQKPGKAPKLLIYDTSKLASGVPSRFSGSGSGTEFTLTISSLQPDDFATYYCFQGSGYPFTFGGGTKLEIKRTVAAPSVFIFPPSDEQLKSGTASVVCLLNNFYPREAKVQWKVDNALQSGNSQESVTEQDSKDSTYSLSSTLTLSKADYEKHKVYACEVTHQGLSSPVTKSFNRGEC

SEQ ID NO: 2273 - protein, 7 aa, Artificial Sequence
  source: /note="Description of Artificial Sequence: Synthetic peptide"
TSGMSVG

SEQ ID NO: 2274 - protein, 15 aa, Artificial Sequence
  source: /note="Description of Artificial Sequence: Synthetic peptide"
DIWWDDKKDYNPSLK

SEQ ID NO: 2275 - protein, 10 aa, Artificial Sequence
  source: /note="Description of Artificial Sequence: Synthetic peptide"
SMITNWYFDV

SEQ ID NO: 2276 - protein, 9 aa, Artificial Sequence
  source: /note="Description of Artificial Sequence: Synthetic peptide"
GFSLSTSGM

SEQ ID NO: 2277 - protein, 5 aa, Artificial Sequence
  source: /note="Description of Artificial Sequence: Synthetic peptide"
WWDDK

SEQ ID NO: 2278 - protein, 10 aa, Artificial Sequence
  source: /note="Description of Artificial Sequence: Synthetic peptide"
SMITNWYFDV

SEQ ID NO: 2279 - protein, 120 aa, Artificial Sequence; identical to SEQ ID NO: 55
  source: /note="Description of Artificial Sequence: Synthetic polypeptide"

SEQ ID NO: 2280 - protein, 450 aa, Artificial Sequence; identical to SEQ ID NO: 56
  source: /note="Description of Artificial Sequence: Synthetic polypeptide"

SEQ ID NO: 2281 - protein, 10 aa, Artificial Sequence
  source: /note="Description of Artificial Sequence: Synthetic peptide"
KAQLSVGYMH

SEQ ID NO: 2282 - protein, 122 aa, Artificial Sequence
  source: /note="Description of Artificial Sequence: Synthetic polypeptide"
DTIPTEIPTSALVKETLALLSTHRTLLIANETLRIPVPVHKNHQLCTEEIFQGIGTLESQTVQGGTVERLFKNLSLIKKYIDGQKKKCGEERRRVNQFLDYLQEFLGVMNTEWIIESSKLAS

SEQ ID NO: 2283 - protein, 9 aa, Artificial Sequence
  source: /note="Description of Artificial Sequence: Synthetic peptide"
FQGSGYPFT

SEQ ID NO: 2284 - protein, 6 aa, Artificial Sequence
  source: /note="Description of Artificial Sequence: Synthetic peptide"
QLSVGY

SEQ ID NO: 2285 - protein, 118 aa, Artificial Sequence
  source: /note="Description of Artificial Sequence: Synthetic polypeptide"
DTIPTEIPTSALVKETLALLSTHRTLLIANETLRIPVPVHKNHQLCTEEIFQGIGTLESQTVQGGTVERLFKNLSLIKKYIDGQKKKCGEERRRVNQFLDYLQEFLGVMNTEWIIESS

SEQ ID NO: 2286 - protein, 6 aa, Artificial Sequence
  source: /note="Description of Artificial Sequence: Synthetic peptide"
GSGYPF

SEQ ID NO: 2287 - protein, 221 aa, Artificial Sequence
  source: /note="Description of Artificial Sequence: Synthetic polypeptide"
DIQMTQSPSTLSASVGDRVTITCKAQLSVGYMHWYQQKPGKAPKLLIYDTIPTEIPTSALVKETLALLSTHRTLLIANETLRIPVPVHKNHQLCTEEIFQGIGTLESQTVQGGTVERLFKNLSLIKKYIDGQKKKCGEERRRVNQFLDYLQEFLGVMNTEWIIESSKLASGVPSRFSGSGSGTEFTLTISSLQPDDFATYYCFQGSGYPFTFGGGTKLEIK

SEQ ID NO: 2288 - protein, 328 aa, Artificial Sequence
  source: /note="Description of Artificial Sequence: Synthetic polypeptide"
DIQMTQSPSTLSASVGDRVTITCKAQLSVGYMHWYQQKPGKAPKLLIYDTIPTEIPTSALVKETLALLSTHRTLLIANETLRIPVPVHKNHQLCTEEIFQGIGTLESQTVQGGTVERLFKNLSLIKKYIDGQKKKCGEERRRVNQFLDYLQEFLGVMNTEWIIESSKLASGVPSRFSGSGSGTEFTLTISSLQPDDFATYYCFQGSGYPFTFGGGTKLEIKRTVAAPSVFIFPPSDEQLKSGTASVVCLLNNFYPREAKVQWKVDNALQSGNSQESVTEQDSKDSTYSLSSTLTLSKADYEKHKVYACEVTHQGLSSPVTKSFNRGEC

SEQ ID NO: 2289 - protein, 7 aa, Artificial Sequence
  source: /note="Description of Artificial Sequence: Synthetic peptide"
TSGMSVG

SEQ ID NO: 2290 - protein, 15 aa, Artificial Sequence
  source: /note="Description of Artificial Sequence: Synthetic peptide"
DIWWDDKKDYNPSLK

SEQ ID NO: 2291 - protein, 10 aa, Artificial Sequence
  source: /note="Description of Artificial Sequence: Synthetic peptide"
SMITNWYFDV

SEQ ID NO: 2292 - protein, 9 aa, Artificial Sequence
  source: /note="Description of Artificial Sequence: Synthetic peptide"
GFSLSTSGM

SEQ ID NO: 2293 - protein, 5 aa, Artificial Sequence
  source: /note="Description of Artificial Sequence: Synthetic peptide"
WWDDK

SEQ ID NO: 2294 - protein, 10 aa, Artificial Sequence
  source: /note="Description of Artificial Sequence: Synthetic peptide"
SMITNWYFDV

SEQ ID NO: 2295 - protein, 120 aa, Artificial Sequence; identical to SEQ ID NO: 55
  source: /note="Description of Artificial Sequence: Synthetic polypeptide"

SEQ ID NO: 2296 - protein, 450 aa, Artificial Sequence; identical to SEQ ID NO: 56
  source: /note="Description of Artificial Sequence: Synthetic polypeptide"

SEQ ID NO: 2297 - protein, 10 aa, Artificial Sequence
  source: /note="Description of Artificial Sequence: Synthetic peptide"
KAQLSVGYMH

SEQ ID NO: 2298 - protein, 7 aa, Artificial Sequence
  source: /note="Description of Artificial Sequence: Synthetic peptide"
DTSKLAS

SEQ ID NO: 2299 - protein, 124 aa, Artificial Sequence
  source: /note="Description of Artificial Sequence: Synthetic polypeptide"
FQGSGIPTEIPTSALVKETLALLSTHRTLLIANETLRIPVPVHKNHQLCTEEIFQGIGTLESQTVQGGTVERLFKNLSLIKKYIDGQKKKCGEERRRVNQFLDYLQEFLGVMNTEWIIESYPFT

SEQ ID NO: 2300 - protein, 6 aa, Artificial Sequence
  source: /note="Description of Artificial Sequence: Synthetic peptide"
QLSVGY

SEQ ID NO: 2301 - protein, 3 aa, Artificial Sequence
  source: /note="Description of Artificial Sequence: Synthetic peptide"
DTS

SEQ ID NO: 2302 - protein, 121 aa, Artificial Sequence
  source: /note="Description of Artificial Sequence: Synthetic polypeptide"
GSGIPTEIPTSALVKETLALLSTHRTLLIANETLRIPVPVHKNHQLCTEEIFQGIGTLESQTVQGGTVERLFKNLSLIKKYIDGQKKKCGEERRRVNQFLDYLQEFLGVMNTEWIIESYPF

SEQ ID NO: 2303 - protein, 221 aa, Artificial Sequence
  source: /note="Description of Artificial Sequence: Synthetic polypeptide"
DIQMTQSPSTLSASVGDRVTITCKAQLSVGYMHWYQQKPGKAPKLLIYDTSKLASGVPSRFSGSGSGTEFTLTISSLQPDDFATYYCFQGSGIPTEIPTSALVKETLALLSTHRTLLIANETLRIPVPVHKNHQLCTEEIFQGIGTLESQTVQGGTVERLFKNLSLIKKYIDGQKKKCGEERRRVNQFLDYLQEFLGVMNTEWIIESYPFTFGGGTKLEIK

SEQ ID NO: 2304 - protein, 328 aa, Artificial Sequence
  source: /note="Description of Artificial Sequence: Synthetic polypeptide"
DIQMTQSPSTLSASVGDRVTITCKAQLSVGYMHWYQQKPGKAPKLLIYDTSKLASGVPSRFSGSGSGTEFTLTISSLQPDDFATYYCFQGSGIPTEIPTSALVKETLALLSTHRTLLIANETLRIPVPVHKNHQLCTEEIFQGIGTLESQTVQGGTVERLFKNLSLIKKYIDGQKKKCGEERRRVNQFLDYLQEFLGVMNTEWIIESYPFTFGGGTKLEIKRTVAAPSVFIFPPSDEQLKSGTASVVCLLNNFYPREAKVQWKVDNALQSGNSQESVTEQDSKDSTYSLSSTLTLSKADYEKHKVYACEVTHQGLSSPVTKSFNRGEC

SEQ ID NO: 2305 - protein, 182 aa, Artificial Sequence
  source: /note="Description of Artificial Sequence: Synthetic polypeptide"
RQTHSLAHLLTKYAEQLLQEYVQLQGDPFGLPSFSPPRLPVAGLSAPAPSHAGLPVHERLRLDAAALAALPPLLDAVCRRQAELNPRAPRLLRRLEDAARQARALGAAVEALLAALGAANRGPRAEPPAATASAASATGVFPAKVLGLRVCGLYREWLSRTEGDLGQLLPGGSASTSGMSVG

SEQ ID NO: 2306 - protein, 16 aa, Artificial Sequence
  source: /note="Description of Artificial Sequence: Synthetic peptide"
DIWWDDKKDYNPSLKS

SEQ ID NO: 2307 - protein, 10 aa, Artificial Sequence
  source: /note="Description of Artificial Sequence: Synthetic peptide"
SMITNWYFDV

SEQ ID NO: 2308 - protein, 184 aa, Artificial Sequence
  source: /note="Description of Artificial Sequence: Synthetic polypeptide"
GFSLIRQTHSLAHLLTKYAEQLLQEYVQLQGDPFGLPSFSPPRLPVAGLSAPAPSHAGLPVHERLRLDAAALAALPPLLDAVCRRQAELNPRAPRLLRRLEDAARQARALGAAVEALLAALGAANRGPRAEPPAATASAASATGVFPAKVLGLRVCGLYREWLSRTEGDLGQLLPGGSASTSGM

SEQ ID NO: 2309 - protein, 5 aa, Artificial Sequence
  source: /note="Description of Artificial Sequence: Synthetic peptide"
WWDDK

SEQ ID NO: 2310 - protein, 10 aa, Artificial Sequence
  source: /note="Description of Artificial Sequence: Synthetic peptide"
SMITNWYFDV

SEQ ID NO: 2311 - protein, 295 aa, Artificial Sequence
  source: /note="Description of Artificial Sequence: Synthetic polypeptide"
QVTLRESGPALVKPTQTLTLTCTFSGFSLIRQTHSLAHLLTKYAEQLLQEYVQLQGDPFGLPSFSPPRLPVAGLSAPAPSHAGLPVHERLRLDAAALAALPPLLDAVCRRQAELNPRAPRLLRRLEDAARQARALGAAVEALLAALGAANRGPRAEPPAATASAASATGVFPAKVLGLRVCGLYREWLSRTEGDLGQLLPGGSASTSGMSVGWIRQPPGKALEWLADIWWDDKKDYNPSLKSRLTISKDTSKNQVVLKVTNMDPADTATYYCARSMITNWYFDVWGAGTTVTVSS

SEQ ID NO: 2312 - protein, 625 aa, Artificial Sequence
  source: /note="Description of Artificial Sequence: Synthetic polypeptide"
QVTLRESGPALVKPTQTLTLTCTFSGFSLIRQTHSLAHLLTKYAEQLLQEYVQLQGDPFGLPSFSPPRLPVAGLSAPAPSHAGLPVHERLRLDAAALAALPPLLDAVCRRQAELNPRAPRLLRRLEDAARQARALGAAVEALLAALGAANRGPRAEPPAATASAASATGVFPAKVLGLRVCGLYREWLSRTEGDLGQLLPGGSASTSGMSVGWIRQPPGKALEWLADIWWDDKKDYNPSLKSRLTISKDTSKNQVVLKVTNMDPADTATYYCARSMITNWYFDVWGAGTTVTVSSASTKGPSVFPLAPSSKSTSGGTAALGCLVKDYFPEPVTVSWNSGALTSGVHTFPAVLQSSGLYSLSSVVTVPSSSLGTQTYICNVNHKPSNTKVDKRVEPKSCDKTHTCPPCPAPELLGGPSVFLFPPKPKDTLMISRTPEVTCVVVAVSHEDPEVKFNWYVDGVEVHNAKTKPREEQYNSTYRVVSVLTVLHQDWLNGKEYKCKVSNKALAAPIEKTISKAKGQPREPQVYTLPPSREEMTKNQVSLTCLVKGFYPSDIAVEWESNGQPENNYKTTPPVLDSDGSFFLYSKLTVDKSRWQQGNVFSCSVMHEALHNHYTQKSLSLSPGK

SEQ ID NO: 2313 - protein, 10 aa, Artificial Sequence
  source: /note="Description of Artificial Sequence: Synthetic peptide"
KAQLSVGYMH

SEQ ID NO: 2314 - protein, 7 aa, Artificial Sequence
  source: /note="Description of Artificial Sequence: Synthetic peptide"
DTSKLAS

SEQ ID NO: 2315 - protein, 9 aa, Artificial Sequence
  source: /note="Description of Artificial Sequence: Synthetic peptide"
FQGSGYPFT

SEQ ID NO: 2316 - protein, 6 aa, Artificial Sequence
  source: /note="Description of Artificial Sequence: Synthetic peptide"
QLSVGY

SEQ ID NO: 2317 - protein, 3 aa, Artificial Sequence
  source: /note="Description of Artificial Sequence: Synthetic peptide"
DTS

SEQ ID NO: 2318 - protein, 6 aa, Artificial Sequence
  source: /note="Description of Artificial Sequence: Synthetic peptide"
GSGYPF

SEQ ID NO: 2319 - protein, 106 aa, Artificial Sequence; identical to SEQ ID NO: 15
  source: /note="Description of Artificial Sequence: Synthetic polypeptide"

SEQ ID NO: 2320 - protein, 213 aa, Artificial Sequence; identical to SEQ ID NO: 16
  source: /note="Description of Artificial Sequence: Synthetic polypeptide"

SEQ ID NO: 2321 - protein, 7 aa, Artificial Sequence
  source: /note="Description of Artificial Sequence: Synthetic peptide"
TSGMSVG

SEQ ID NO: 2322 - protein, 191 aa, Artificial Sequence
  source: /note="Description of Artificial Sequence: Synthetic polypeptide"
DIWWDIRQTHSLAHLLTKYAEQLLQEYVQLQGDPFGLPSFSPPRLPVAGLSAPAPSHAGLPVHERLRLDAAALAALPPLLDAVCRRQAELNPRAPRLLRRLEDAARQARALGAAVEALLAALGAANRGPRAEPPAATASAASATGVFPAKVLGLRVCGLYREWLSRTEGDLGQLLPGGSADKKDYNPSLKS

SEQ ID NO: 2323 - protein, 10 aa, Artificial Sequence
  source: /note="Description of Artificial Sequence: Synthetic peptide"
SMITNWYFDV

SEQ ID NO: 2324 - protein, 9 aa, Artificial Sequence
  source: /note="Description of Artificial Sequence: Synthetic peptide"
GFSLSTSGM

SEQ ID NO: 2325 - protein, 180 aa, Artificial Sequence
  source: /note="Description of Artificial Sequence: Synthetic polypeptide"
WWDIRQTHSLAHLLTKYAEQLLQEYVQLQGDPFGLPSFSPPRLPVAGLSAPAPSHAGLPVHERLRLDAAALAALPPLLDAVCRRQAELNPRAPRLLRRLEDAARQARALGAAVEALLAALGAANRGPRAEPPAATASAASATGVFPAKVLGLRVCGLYREWLSRTEGDLGQLLPGGSADK

SEQ ID NO: 2326 - protein, 10 aa, Artificial Sequence
  source: /note="Description of Artificial Sequence: Synthetic peptide"
SMITNWYFDV

SEQ ID NO: 2327 - protein, 295 aa, Artificial Sequence
  source: /note="Description of Artificial Sequence: Synthetic polypeptide"
QVTLRESGPALVKPTQTLTLTCTFSGFSLSTSGMSVGWIRQPPGKALEWLADIWWDIRQTHSLAHLLTKYAEQLLQEYVQLQGDPFGLPSFSPPRLPVAGLSAPAPSHAGLPVHERLRLDAAALAALPPLLDAVCRRQAELNPRAPRLLRRLEDAARQARALGAAVEALLAALGAANRGPRAEPPAATASAASATGVFPAKVLGLRVCGLYREWLSRTEGDLGQLLPGGSADKKDYNPSLKSRLTISKDTSKNQVVLKVTNMDPADTATYYCARSMITNWYFDVWGAGTTVTVSS

SEQ ID NO: 2328 - protein, 625 aa, Artificial Sequence
  source: /note="Description of Artificial Sequence: Synthetic polypeptide"
QVTLRESGPALVKPTQTLTLTCTFSGFSLSTSGMSVGWIRQPPGKALEWLADIWWDIRQTHSLAHLLTKYAEQLLQEYVQLQGDPFGLPSFSPPRLPVAGLSAPAPSHAGLPVHERLRLDAAALAALPPLLDAVCRRQAELNPRAPRLLRRLEDAARQARALGAAVEALLAALGAANRGPRAEPPAATASAASATGVFPAKVLGLRVCGLYREWLSRTEGDLGQLLPGGSADKKDYNPSLKSRLTISKDTSKNQVVLKVTNMDPADTATYYCARSMITNWYFDVWGAGTTVTVSSASTKGPSVFPLAPSSKSTSGGTAALGCLVKDYFPEPVTVSWNSGALTSGVHTFPAVLQSSGLYSLSSVVTVPSSSLGTQTYICNVNHKPSNTKVDKRVEPKSCDKTHTCPPCPAPELLGGPSVFLFPPKPKDTLMISRTPEVTCVVVAVSHEDPEVKFNWYVDGVEVHNAKTKPREEQYNSTYRVVSVLTVLHQDWLNGKEYKCKVSNKALAAPIEKTISKAKGQPREPQVYTLPPSREEMTKNQVSLTCLVKGFYPSDIAVEWESNGQPENNYKTTPPVLDSDGSFFLYSKLTVDKSRWQQGNVFSCSVMHEALHNHYTQKSLSLSPGK

SEQ ID NO: 2329 - protein, 10 aa, Artificial Sequence
  source: /note="Description of Artificial Sequence: Synthetic peptide"
KAQLSVGYMH

SEQ ID NO: 2330 - protein, 7 aa, Artificial Sequence
  source: /note="Description of Artificial Sequence: Synthetic peptide"
DTSKLAS

SEQ ID NO: 2331 - protein, 9 aa, Artificial Sequence
  source: /note="Description of Artificial Sequence: Synthetic peptide"
FQGSGYPFT

SEQ ID NO: 2332 - protein, 6 aa, Artificial Sequence
  source: /note="Description of Artificial Sequence: Synthetic peptide"
QLSVGY

SEQ ID NO: 2333 - protein, 3 aa, Artificial Sequence
  source: /note="Description of Artificial Sequence: Synthetic peptide"
DTS

SEQ ID NO: 2334 - protein, 6 aa, Artificial Sequence
  source: /note="Description of Artificial Sequence: Synthetic peptide"
GSGYPF

SEQ ID NO: 2335 - protein, 106 aa, Artificial Sequence; identical to SEQ ID NO: 15
  source: /note="Description of Artificial Sequence: Synthetic polypeptide"

SEQ ID NO: 2336 - protein, 213 aa, Artificial Sequence; identical to SEQ ID NO: 16
  source: /note="Description of Artificial Sequence: Synthetic polypeptide"

SEQ ID NO: 2337 - protein, 7 aa, Artificial Sequence
  source: /note="Description of Artificial Sequence: Synthetic peptide"
TSGMSVG

SEQ ID NO: 2338 - protein, 16 aa, Artificial Sequence
  source: /note="Description of Artificial Sequence: Synthetic peptide"
DIWWDDKKDYNPSLKS

SEQ ID NO: 2339 - protein, 185 aa, Artificial Sequence
  source: /note="Description of Artificial Sequence: Synthetic polypeptide"
SMITIRQTHSLAHLLTKYAEQLLQEYVQLQGDPFGLPSFSPPRLPVAGLSAPAPSHAGLPVHERLRLDAAALAALPPLLDAVCRRQAELNPRAPRLLRRLEDAARQARALGAAVEALLAALGAANRGPRAEPPAATASAASATGVFPAKVLGLRVCGLYREWLSRTEGDLGQLLPGGSANWYFDV

SEQ ID NO: 2340 - protein, 9 aa, Artificial Sequence
  source: /note="Description of Artificial Sequence: Synthetic peptide"
GFSLSTSGM

SEQ ID NO: 2341 - protein, 5 aa, Artificial Sequence
  source: /note="Description of Artificial Sequence: Synthetic peptide"
WWDDK

SEQ ID NO: 2342 - protein, 185 aa, Artificial Sequence; identical to SEQ ID NO: 2339
  source: /note="Description of Artificial Sequence: Synthetic polypeptide"

SEQ ID NO: 2343 - protein, 295 aa, Artificial Sequence
  source: /note="Description of Artificial Sequence: Synthetic polypeptide"
QVTLRESGPALVKPTQTLTLTCTFSGFSLSTSGMSVGWIRQPPGKALEWLADIWWDDKKDYNPSLKSRLTISKDTSKNQVVLKVTNMDPADTATYYCARSMITIRQTHSLAHLLTKYAEQLLQEYVQLQGDPFGLPSFSPPRLPVAGLSAPAPSHAGLPVHERLRLDAAALAALPPLLDAVCRRQAELNPRAPRLLRRLEDAARQARALGAAVEALLAALGAANRGPRAEPPAATASAASATGVFPAKVLGLRVCGLYREWLSRTEGDLGQLLPGGSANWYFDVWGAGTTVTVSS

SEQ ID NO: 2344 - protein, 625 aa, Artificial Sequence
  source: /note="Description of Artificial Sequence: Synthetic polypeptide"
QVTLRESGPALVKPTQTLTLTCTFSGFSLSTSGMSVGWIRQPPGKALEWLADIWWDDKKDYNPSLKSRLTISKDTSKNQVVLKVTNMDPADTATYYCARSMITIRQTHSLAHLLTKYAEQLLQEYVQLQGDPFGLPSFSPPRLPVAGLSAPAPSHAGLPVHERLRLDAAALAALPPLLDAVCRRQAELNPRAPRLLRRLEDAARQARALGAAVEALLAALGAANRGPRAEPPAATASAASATGVFPAKVLGLRVCGLYREWLSRTEGDLGQLLPGGSANWYFDVWGAGTTVTVSSASTKGPSVFPLAPSSKSTSGGTAALGCLVKDYFPEPVTVSWNSGALTSGVHTFPAVLQSSGLYSLSSVVTVPSSSLGTQTYICNVNHKPSNTKVDKRVEPKSCDKTHTCPPCPAPELLGGPSVFLFPPKPKDTLMISRTPEVTCVVVAVSHEDPEVKFNWYVDGVEVHNAKTKPREEQYNSTYRVVSVLTVLHQDWLNGKEYKCKVSNKALAAPIEKTISKAKGQPREPQVYTLPPSREEMTKNQVSLTCLVKGFYPSDIAVEWESNGQPENNYKTTPPVLDSDGSFFLYSKLTVDKSRWQQGNVFSCSVMHEALHNHYTQKSLSLSPGK

SEQ ID NO: 2345 - protein, 10 aa, Artificial Sequence
  source: /note="Description of Artificial Sequence: Synthetic peptide"
KAQLSVGYMH

SEQ ID NO: 2346 - protein, 7 aa, Artificial Sequence
  source: /note="Description of Artificial Sequence: Synthetic peptide"
DTSKLAS

SEQ ID NO: 2347 - protein, 9 aa, Artificial Sequence
  source: /note="Description of Artificial Sequence: Synthetic peptide"
FQGSGYPFT

SEQ ID NO: 2348 - protein, 6 aa, Artificial Sequence
  source: /note="Description of Artificial Sequence: Synthetic peptide"
QLSVGY

SEQ ID NO: 2349 - protein, 3 aa, Artificial Sequence
  source: /note="Description of Artificial Sequence: Synthetic peptide"
DTS

SEQ ID NO: 2350 - protein, 6 aa, Artificial Sequence
  source: /note="Description of Artificial Sequence: Synthetic peptide"
GSGYPF

SEQ ID NO: 2351 - protein, 106 aa, Artificial Sequence; identical to SEQ ID NO: 15
  source: /note="Description of Artificial Sequence: Synthetic polypeptide"

SEQ ID NO: 2352 - protein, 213 aa, Artificial Sequence; identical to SEQ ID NO: 16
  source: /note="Description of Artificial Sequence: Synthetic polypeptide"

SEQ ID NO: 2353 - protein, 7 aa, Artificial Sequence
  source: /note="Description of Artificial Sequence: Synthetic peptide"
TSGMSVG

SEQ ID NO: 2354 - protein, 15 aa, Artificial Sequence
  source: /note="Description of Artificial Sequence: Synthetic peptide"
DIWWDDKKDYNPSLK

SEQ ID NO: 2355 - protein, 10 aa, Artificial Sequence
  source: /note="Description of Artificial Sequence: Synthetic peptide"
SMITNWYFDV

SEQ ID NO: 2356 - protein, 9 aa, Artificial Sequence
  source: /note="Description of Artificial Sequence: Synthetic peptide"
GFSLSTSGM

SEQ ID NO: 2357 - protein, 5 aa, Artificial Sequence
  source: /note="Description of Artificial Sequence: Synthetic peptide"
WWDDK

SEQ ID NO: 2358 - protein, 10 aa, Artificial Sequence
  source: /note="Description of Artificial Sequence: Synthetic peptide"
SMITNWYFDV

SEQ ID NO: 2359 - protein, 120 aa, Artificial Sequence; identical to SEQ ID NO: 55
  source: /note="Description of Artificial Sequence: Synthetic polypeptide"

SEQ ID NO: 2360 - protein, 450 aa, Artificial Sequence; identical to SEQ ID NO: 56
  source: /note="Description of Artificial Sequence: Synthetic polypeptide"

SEQ ID NO: 2361 - protein, 185 aa, Artificial Sequence
  source: /note="Description of Artificial Sequence: Synthetic polypeptide"
KAQLSIRQTHSLAHLLTKYAEQLLQEYVQLQGDPFGLPSFSPPRLPVAGLSAPAPSHAGLPVHERLRLDAAALAALPPLLDAVCRRQAELNPRAPRLLRRLEDAARQARALGAAVEALLAALGAANRGPRAEPPAATASAASATGVFPAKVLGLRVCGLYREWLSRTEGDLGQLLPGGSAVGYMH

SEQ ID NO: 2362 - protein, 7 aa, Artificial Sequence
  source: /note="Description of Artificial Sequence: Synthetic peptide"
DTSKLAS

SEQ ID NO: 2363 - protein, 9 aa, Artificial Sequence
  source: /note="Description of Artificial Sequence: Synthetic peptide"
FQGSGYPFT

SEQ ID NO: 2364 - protein, 181 aa, Artificial Sequence
  source: /note="Description of Artificial Sequence: Synthetic polypeptide"
QLSIRQTHSLAHLLTKYAEQLLQEYVQLQGDPFGLPSFSPPRLPVAGLSAPAPSHAGLPVHERLRLDAAALAALPPLLDAVCRRQAELNPRAPRLLRRLEDAARQARALGAAVEALLAALGAANRGPRAEPPAATASAASATGVFPAKVLGLRVCGLYREWLSRTEGDLGQLLPGGSAVGY

SEQ ID NO: 2365 - protein, 3 aa, Artificial Sequence
  source: /note="Description of Artificial Sequence: Synthetic peptide"
DTS

SEQ ID NO: 2366 - protein, 6 aa, Artificial Sequence
  source: /note="Description of Artificial Sequence: Synthetic peptide"
GSGYPF

SEQ ID NO: 2367 - protein, 281 aa, Artificial Sequence
  source: /note="Description of Artificial Sequence: Synthetic polypeptide"
DIQMTQSPSTLSASVGDRVTITCKAQLSIRQTHSLAHLLTKYAEQLLQEYVQLQGDPFGLPSFSPPRLPVAGLSAPAPSHAGLPVHERLRLDAAALAALPPLLDAVCRRQAELNPRAPRLLRRLEDAARQARALGAAVEALLAALGAANRGPRAEPPAATASAASATGVFPAKVLGLRVCGLYREWLSRTEGDLGQLLPGGSAVGYMHWYQQKPGKAPKLLIYDTSKLASGVPSRFSGSGSGTEFTLTISSLQPDDFATYYCFQGSGYPFTFGGGTKLEIK

SEQ ID NO: 2368 - protein, 388 aa, Artificial Sequence
  source: /note="Description of Artificial Sequence: Synthetic polypeptide"
DIQMTQSPSTLSASVGDRVTITCKAQLSIRQTHSLAHLLTKYAEQLLQEYVQLQGDPFGLPSFSPPRLPVAGLSAPAPSHAGLPVHERLRLDAAALAALPPLLDAVCRRQAELNPRAPRLLRRLEDAARQARALGAAVEALLAALGAANRGPRAEPPAATASAASATGVFPAKVLGLRVCGLYREWLSRTEGDLGQLLPGGSAVGYMHWYQQKPGKAPKLLIYDTSKLASGVPSRFSGSGSGTEFTLTISSLQPDDFATYYCFQGSGYPFTFGGGTKLEIKRTVAAPSVFIFPPSDEQLKSGTASVVCLLNNFYPREAKVQWKVDNALQSGNSQESVTEQDSKDSTYSLSSTLTLSKADYEKHKVYACEVTHQGLSSPVTKSFNRGEC

SEQ ID NO: 2369 - protein, 7 aa, Artificial Sequence
  source: /note="Description of Artificial Sequence: Synthetic peptide"
TSGMSVG

SEQ ID NO: 2370 - protein, 15 aa, Artificial Sequence
  source: /note="Description of Artificial Sequence: Synthetic peptide"
DIWWDDKKDYNPSLK

SEQ ID NO: 2371 - protein, 10 aa, Artificial Sequence
  source: /note="Description of Artificial Sequence: Synthetic peptide"
SMITNWYFDV

SEQ ID NO: 2372 - protein, 9 aa, Artificial Sequence
  source: /note="Description of Artificial Sequence: Synthetic peptide"
GFSLSTSGM

SEQ ID NO: 2373 - protein, 5 aa, Artificial Sequence
  source: /note="Description of Artificial Sequence: Synthetic peptide"
WWDDK

SEQ ID NO: 2374 - protein, 10 aa, Artificial Sequence
  source: /note="Description of Artificial Sequence: Synthetic peptide"
SMITNWYFDV

SEQ ID NO: 2375 - protein, 120 aa, Artificial Sequence; identical to SEQ ID NO: 55
  source: /note="Description of Artificial Sequence: Synthetic polypeptide"

SEQ ID NO: 2376 - protein, 450 aa, Artificial Sequence; identical to SEQ ID NO: 56
  source: /note="Description of Artificial Sequence: Synthetic polypeptide"

SEQ ID NO: 2377 - protein, 10 aa, Artificial Sequence
  source: /note="Description of Artificial Sequence: Synthetic peptide"
KAQLSVGYMH

SEQ ID NO: 2378 - protein, 182 aa, Artificial Sequence
  source: /note="Description of Artificial Sequence: Synthetic polypeptide"
DTIRQTHSLAHLLTKYAEQLLQEYVQLQGDPFGLPSFSPPRLPVAGLSAPAPSHAGLPVHERLRLDAAALAALPPLLDAVCRRQAELNPRAPRLLRRLEDAARQARALGAAVEALLAALGAANRGPRAEPPAATASAASATGVFPAKVLGLRVCGLYREWLSRTEGDLGQLLPGGSASKLAS

SEQ ID NO: 2379 - protein, 9 aa, Artificial Sequence
  source: /note="Description of Artificial Sequence: Synthetic peptide"
FQGSGYPFT

SEQ ID NO: 2380 - protein, 6 aa, Artificial Sequence
  source: /note="Description of Artificial Sequence: Synthetic peptide"
QLSVGY

SEQ ID NO: 2381 - protein, 178 aa, Artificial Sequence
  source: /note="Description of Artificial Sequence: Synthetic polypeptide"
DTIRQTHSLAHLLTKYAEQLLQEYVQLQGDPFGLPSFSPPRLPVAGLSAPAPSHAGLPVHERLRLDAAALAALPPLLDAVCRRQAELNPRAPRLLRRLEDAARQARALGAAVEALLAALGAANRGPRAEPPAATASAASATGVFPAKVLGLRVCGLYREWLSRTEGDLGQLLPGGSAS

SEQ ID NO: 2382 - protein, 6 aa, Artificial Sequence
  source: /note="Description of Artificial Sequence: Synthetic peptide"
GSGYPF

SEQ ID NO: 2383 - protein, 281 aa, Artificial Sequence
  source: /note="Description of Artificial Sequence: Synthetic polypeptide"
DIQMTQSPSTLSASVGDRVTITCKAQLSVGYMHWYQQKPGKAPKLLIYDTIRQTHSLAHLLTKYAEQLLQEYVQLQGDPFGLPSFSPPRLPVAGLSAPAPSHAGLPVHERLRLDAAALAALPPLLDAVCRRQAELNPRAPRLLRRLEDAARQARALGAAVEALLAALGAANRGPRAEPPAATASAASATGVFPAKVLGLRVCGLYREWLSRTEGDLGQLLPGGSASKLASGVPSRFSGSGSGTEFTLTISSLQPDDFATYYCFQGSGYPFTFGGGTKLEIK

SEQ ID NO: 2384 - protein, 388 aa, Artificial Sequence
  source: /note="Description of Artificial Sequence: Synthetic polypeptide"
DIQMTQSPSTLSASVGDRVTITCKAQLSVGYMHWYQQKPGKAPKLLIYDTIRQTHSLAHLLTKYAEQLLQEYVQLQGDPFGLPSFSPPRLPVAGLSAPAPSHAGLPVHERLRLDAAALAALPPLLDAVCRRQAELNPRAPRLLRRLEDAARQARALGAAVEALLAALGAANRGPRAEPPAATASAASATGVFPAKVLGLRVCGLYREWLSRTEGDLGQLLPGGSASKLASGVPSRFSGSGSGTEFTLTISSLQPDDFATYYCFQGSGYPFTFGGGTKLEIKRTVAAPSVFIFPPSDEQLKSGTASVVCLLNNFYPREAKVQWKVDNALQSGNSQESVTEQDSKDSTYSLSSTLTLSKADYEKHKVYACEVTHQGLSSPVTKSFNRGEC

SEQ ID NO: 2385 - protein, 7 aa, Artificial Sequence
  source: /note="Description of Artificial Sequence: Synthetic peptide"
TSGMSVG

SEQ ID NO: 2386 - protein, 15 aa, Artificial Sequence
  source: /note="Description of Artificial Sequence: Synthetic peptide"
DIWWDDKKDYNPSLK

SEQ ID NO: 2387 - protein, 10 aa, Artificial Sequence
  source: /note="Description of Artificial Sequence: Synthetic peptide"
SMITNWYFDV

SEQ ID NO: 2388 - protein, 9 aa, Artificial Sequence
  source: /note="Description of Artificial Sequence: Synthetic peptide"
GFSLSTSGM

SEQ ID NO: 2389 - protein, 5 aa, Artificial Sequence
  source: /note="Description of Artificial Sequence: Synthetic peptide"
WWDDK

SEQ ID NO: 2390 - protein, 10 aa, Artificial Sequence
  source: /note="Description of Artificial Sequence: Synthetic peptide"
SMITNWYFDV

SEQ ID NO: 2391 - protein, 120 aa, Artificial Sequence; identical to SEQ ID NO: 55
  source: /note="Description of Artificial Sequence: Synthetic polypeptide"

SEQ ID NO: 2392 - protein, 450 aa, Artificial Sequence; identical to SEQ ID NO: 56
  source: /note="Description of Artificial Sequence: Synthetic polypeptide"

SEQ ID NO: 2393 - protein, 10 aa, Artificial Sequence
  source: /note="Description of Artificial Sequence: Synthetic peptide"
KAQLSVGYMH

SEQ ID NO: 2394 - protein, 7 aa, Artificial Sequence
  source: /note="Description of Artificial Sequence: Synthetic peptide"
DTSKLAS

SEQ ID NO: 2395 - protein, 184 aa, Artificial Sequence
  source: /note="Description of Artificial Sequence: Synthetic polypeptide"
FQGSGIRQTHSLAHLLTKYAEQLLQEYVQLQGDPFGLPSFSPPRLPVAGLSAPAPSHAGLPVHERLRLDAAALAALPPLLDAVCRRQAELNPRAPRLLRRLEDAARQARALGAAVEALLAALGAANRGPRAEPPAATASAASATGVFPAKVLGLRVCGLYREWLSRTEGDLGQLLPGGSAYPFT

SEQ ID NO: 2396 - protein, 6 aa, Artificial Sequence
  source: /note="Description of Artificial Sequence: Synthetic peptide"
QLSVGY

SEQ ID NO: 2397 - protein, 3 aa, Artificial Sequence
  source: /note="Description of Artificial Sequence: Synthetic peptide"
DTS

SEQ ID NO: 2398 - protein, 181 aa, Artificial Sequence
  source: /note="Description of Artificial Sequence: Synthetic polypeptide"
GSGIRQTHSLAHLLTKYAEQLLQEYVQLQGDPFGLPSFSPPRLPVAGLSAPAPSHAGLPVHERLRLDAAALAALPPLLDAVCRRQAELNPRAPRLLRRLEDAARQARALGAAVEALLAALGAANRGPRAEPPAATASAASATGVFPAKVLGLRVCGLYREWLSRTEGDLGQLLPGGSAYPF

SEQ ID NO: 2399 - protein, 281 aa, Artificial Sequence
  source: /note="Description of Artificial Sequence: Synthetic polypeptide"
DIQMTQSPSTLSASVGDRVTITCKAQLSVGYMHWYQQKPGKAPKLLIYDTSKLASGVPSRFSGSGSGTEFTLTISSLQPDDFATYYCFQGSGIRQTHSLAHLLTKYAEQLLQEYVQLQGDPFGLPSFSPPRLPVAGLSAPAPSHAGLPVHERLRLDAAALAALPPLLDAVCRRQAELNPRAPRLLRRLEDAARQARALGAAVEALLAALGAANRGPRAEPPAATASAASATGVFPAKVLGLRVCGLYREWLSRTEGDLGQLLPGGSAYPFTFGGGTKLEIK

SEQ ID NO: 2400 - protein, 388 aa, Artificial Sequence
  source: /note="Description of Artificial Sequence: Synthetic polypeptide"
DIQMTQSPSTLSASVGDRVTITCKAQLSVGYMHWYQQKPGKAPKLLIYDTSKLASGVPSRFSGSGSGTEFTLTISSLQPDDFATYYCFQGSGIRQTHSLAHLLTKYAEQLLQEYVQLQGDPFGLPSFSPPRLPVAGLSAPAPSHAGLPVHERLRLDAAALAALPPLLDAVCRRQAELNPRAPRLLRRLEDAARQARALGAAVEALLAALGAANRGPRAEPPAATASAASATGVFPAKVLGLRVCGLYREWLSRTEGDLGQLLPGGSAYPFTFGGGTKLEIKRTVAAPSVFIFPPSDEQLKSGTASVVCLLNNFYPREAKVQWKVDNALQSGNSQESVTEQDSKDSTYSLSSTLTLSKADYEKHKVYACEVTHQGLSSPVTKSFNRGEC

SEQ ID NO: 2401 - protein, 159 aa, Artificial Sequence
  source: /note="Description of Artificial Sequence: Synthetic polypeptide"
KTLNLGSCVIATNLQEIRNGFSEIRGSVQAKDGNIDIRILRRTESLQDTKPANRCCLLRHLLRLYLDRVFKNYQTPDHYTLRKISSLANSFLTIKKDLRLCHAHMTCHCGEEAMKKYSQILSHFEKLEPQAAVVKALGELDILLQWMEETESTSGMSVG

SEQ ID NO: 2402 - protein, 16 aa, Artificial Sequence
  source: /note="Description of Artificial Sequence: Synthetic peptide"
DIWWDDKKDYNPSLKS

SEQ ID NO: 2403 - protein, 10 aa, Artificial Sequence
  source: /note="Description of Artificial Sequence: Synthetic peptide"
SMITNWYFDV

SEQ ID NO: 2404 - protein, 161 aa, Artificial Sequence
  source: /note="Description of Artificial Sequence: Synthetic polypeptide"
GFSLLKTLNLGSCVIATNLQEIRNGFSEIRGSVQAKDGNIDIRILRRTESLQDTKPANRCCLLRHLLRLYLDRVFKNYQTPDHYTLRKISSLANSFLTIKKDLRLCHAHMTCHCGEEAMKKYSQILSHFEKLEPQAAVVKALGELDILLQWMEETESTSGM

SEQ ID NO: 2405 - protein, 5 aa, Artificial Sequence
  source: /note="Description of Artificial Sequence: Synthetic peptide"
WWDDK

SEQ ID NO: 2406 - protein, 10 aa, Artificial Sequence
  source: /note="Description of Artificial Sequence: Synthetic peptide"
SMITNWYFDV

SEQ ID NO: 2407 - protein, 272 aa, Artificial Sequence
  source: /note="Description of Artificial Sequence: Synthetic polypeptide"
QVTLRESGPALVKPTQTLTLTCTFSGFSLLKTLNLGSCVIATNLQEIRNGFSEIRGSVQAKDGNIDIRILRRTESLQDTKPANRCCLLRHLLRLYLDRVFKNYQTPDHYTLRKISSLANSFLTIKKDLRLCHAHMTCHCGEEAMKKYSQILSHFEKLEPQAAVVKALGELDILLQWMEETESTSGMSVGWIRQPPGKALEWLADIWWDDKKDYNPSLKSRLTISKDTSKNQVVLKVTNMDPADTATYYCARSMITNWYFDVWGAGTTVTVSS

SEQ ID NO: 2408 - protein, 602 aa, Artificial Sequence
  source: /note="Description of Artificial Sequence: Synthetic polypeptide"
QVTLRESGPALVKPTQTLTLTCTFSGFSLLKTLNLGSCVIATNLQEIRNGFSEIRGSVQAKDGNIDIRILRRTESLQDTKPANRCCLLRHLLRLYLDRVFKNYQTPDHYTLRKISSLANSFLTIKKDLRLCHAHMTCHCGEEAMKKYSQILSHFEKLEPQAAVVKALGELDILLQWMEETESTSGMSVGWIRQPPGKALEWLADIWWDDKKDYNPSLKSRLTISKDTSKNQVVLKVTNMDPADTATYYCARSMITNWYFDVWGAGTTVTVSSASTKGPSVFPLAPSSKSTSGGTAALGCLVKDYFPEPVTVSWNSGALTSGVHTFPAVLQSSGLYSLSSVVTVPSSSLGTQTYICNVNHKPSNTKVDKRVEPKSCDKTHTCPPCPAPELLGGPSVFLFPPKPKDTLMISRTPEVTCVVVAVSHEDPEVKFNWYVDGVEVHNAKTKPREEQYNSTYRVVSVLTVLHQDWLNGKEYKCKVSNKALAAPIEKTISKAKGQPREPQVYTLPPSREEMTKNQVSLTCLVKGFYPSDIAVEWESNGQPENNYKTTPPVLDSDGSFFLYSKLTVDKSRWQQGNVFSCSVMHEALHNHYTQKSLSLSPGK

SEQ ID NO: 2409 - protein, 10 aa, Artificial Sequence
  source: /note="Description of Artificial Sequence: Synthetic peptide"
KAQLSVGYMH

SEQ ID NO: 2410 - protein, 7 aa, Artificial Sequence
  source: /note="Description of Artificial Sequence: Synthetic peptide"
DTSKLAS

SEQ ID NO: 2411 - protein, 9 aa, Artificial Sequence
  source: /note="Description of Artificial Sequence: Synthetic peptide"
FQGSGYPFT

SEQ ID NO: 2412 - protein, 6 aa, Artificial Sequence
  source: /note="Description of Artificial Sequence: Synthetic peptide"
QLSVGY

SEQ ID NO: 2413 - protein, 3 aa, Artificial Sequence
  source: /note="Description of Artificial Sequence: Synthetic peptide"
DTS

SEQ ID NO: 2414 - protein, 6 aa, Artificial Sequence
  source: /note="Description of Artificial Sequence: Synthetic peptide"
GSGYPF

SEQ ID NO: 2415 - protein, 106 aa, Artificial Sequence; identical to SEQ ID NO: 15
  source: /note="Description of Artificial Sequence: Synthetic polypeptide"

SEQ ID NO: 2416 - protein, 213 aa, Artificial Sequence; identical to SEQ ID NO: 16
  source: /note="Description of Artificial Sequence: Synthetic polypeptide"

SEQ ID NO: 2417 - protein, 7 aa, Artificial Sequence
  source: /note="Description of Artificial Sequence: Synthetic peptide"
TSGMSVG

SEQ ID NO: 2418 - protein, 168 aa, Artificial Sequence
  source: /note="Description of Artificial Sequence: Synthetic polypeptide"
DIWWDLKTLNLGSCVIATNLQEIRNGFSEIRGSVQAKDGNIDIRILRRTESLQDTKPANRCCLLRHLLRLYLDRVFKNYQTPDHYTLRKISSLANSFLTIKKDLRLCHAHMTCHCGEEAMKKYSQILSHFEKLEPQAAVVKALGELDILLQWMEETEDKKDYNPSLKS

SEQ ID NO: 2419 - protein, 10 aa, Artificial Sequence
  source: /note="Description of Artificial Sequence: Synthetic peptide"
SMITNWYFDV

SEQ ID NO: 2420 - protein, 9 aa, Artificial Sequence
  source: /note="Description of Artificial Sequence: Synthetic peptide"
GFSLSTSGM

SEQ ID NO: 2421 - protein, 157 aa, Artificial Sequence
  source: /note="Description of Artificial Sequence: Synthetic polypeptide"
WWDLKTLNLGSCVIATNLQEIRNGFSEIRGSVQAKDGNIDIRILRRTESLQDTKPANRCCLLRHLLRLYLDRVFKNYQTPDHYTLRKISSLANSFLTIKKDLRLCHAHMTCHCGEEAMKKYSQILSHFEKLEPQAAVVKALGELDILLQWMEETEDK

SEQ ID NO: 2422 - protein, 10 aa, Artificial Sequence
  source: /note="Description of Artificial Sequence: Synthetic peptide"
SMITNWYFDV

SEQ ID NO: 2423 - protein, 272 aa, Artificial Sequence
  source: /note="Description of Artificial Sequence: Synthetic polypeptide"
QVTLRESGPALVKPTQTLTLTCTFSGFSLSTSGMSVGWIRQPPGKALEWLADIWWDLKTLNLGSCVIATNLQEIRNGFSEIRGSVQAKDGNIDIRILRRTESLQDTKPANRCCLLRHLLRLYLDRVFKNYQTPDHYTLRKISSLANSFLTIKKDLRLCHAHMTCHCGEEAMKKYSQILSHFEKLEPQAAVVKALGELDILLQWMEETEDKKDYNPSLKSRLTISKDTSKNQVVLKVTNMDPADTATYYCARSMITNWYFDVWGAGTTVTVSS

SEQ ID NO: 2424 - protein, 602 aa, Artificial Sequence
  source: /note="Description of Artificial Sequence: Synthetic polypeptide"
QVTLRESGPALVKPTQTLTLTCTFSGFSLSTSGMSVGWIRQPPGKALEWLADIWWDLKTLNLGSCVIATNLQEIRNGFSEIRGSVQAKDGNIDIRILRRTESLQDTKPANRCCLLRHLLRLYLDRVFKNYQTPDHYTLRKISSLANSFLTIKKDLRLCHAHMTCHCGEEAMKKYSQILSHFEKLEPQAAVVKALGELDILLQWMEETEDKKDYNPSLKSRLTISKDTSKNQVVLKVTNMDPADTATYYCARSMITNWYFDVWGAGTTVTVSSASTKGPSVFPLAPSSKSTSGGTAALGCLVKDYFPEPVTVSWNSGALTSGVHTFPAVLQSSGLYSLSSVVTVPSSSLGTQTYICNVNHKPSNTKVDKRVEPKSCDKTHTCPPCPAPELLGGPSVFLFPPKPKDTLMISRTPEVTCVVVAVSHEDPEVKFNWYVDGVEVHNAKTKPREEQYNSTYRVVSVLTVLHQDWLNGKEYKCKVSNKALAAPIEKTISKAKGQPREPQVYTLPPSREEMTKNQVSLTCLVKGFYPSDIAVEWESNGQPENNYKTTPPVLDSDGSFFLYSKLTVDKSRWQQGNVFSCSVMHEALHNHYTQKSLSLSPGK

SEQ ID NO: 2425 - protein, 10 aa, Artificial Sequence
  source: /note="Description of Artificial Sequence: Synthetic peptide"
KAQLSVGYMH

SEQ ID NO: 2426 - protein, 7 aa, Artificial Sequence
  source: /note="Description of Artificial Sequence: Synthetic peptide"
DTSKLAS

SEQ ID NO: 2427 - protein, 9 aa, Artificial Sequence
  source: /note="Description of Artificial Sequence: Synthetic peptide"
FQGSGYPFT

SEQ ID NO: 2428 - protein, 6 aa, Artificial Sequence
  source: /note="Description of Artificial Sequence: Synthetic peptide"
QLSVGY

SEQ ID NO: 2429 - protein, 3 aa, Artificial Sequence
  source: /note="Description of Artificial Sequence: Synthetic peptide"
DTS

SEQ ID NO: 2430 - protein, 6 aa, Artificial Sequence
  source: /note="Description of Artificial Sequence: Synthetic peptide"
GSGYPF

SEQ ID NO: 2431 - protein, 106 aa, Artificial Sequence; identical to SEQ ID NO: 15
  source: /note="Description of Artificial Sequence: Synthetic polypeptide"

SEQ ID NO: 2432 - protein, 213 aa, Artificial Sequence; identical to SEQ ID NO: 16
  source: /note="Description of Artificial Sequence: Synthetic polypeptide"

SEQ ID NO: 2433 - protein, 7 aa, Artificial Sequence
  source: /note="Description of Artificial Sequence: Synthetic peptide"
TSGMSVG

SEQ ID NO: 2434 - protein, 16 aa, Artificial Sequence
  source: /note="Description of Artificial Sequence: Synthetic peptide"
DIWWDDKKDYNPSLKS

SEQ ID NO: 2435 - protein, 162 aa, Artificial Sequence
  source: /note="Description of Artificial Sequence: Synthetic polypeptide"
SMITLKTLNLGSCVIATNLQEIRNGFSEIRGSVQAKDGNIDIRILRRTESLQDTKPANRCCLLRHLLRLYLDRVFKNYQTPDHYTLRKISSLANSFLTIKKDLRLCHAHMTCHCGEEAMKKYSQILSHFEKLEPQAAVVKALGELDILLQWMEETENWYFDV

SEQ ID NO: 2436 - protein, 9 aa, Artificial Sequence
  source: /note="Description of Artificial Sequence: Synthetic peptide"
GFSLSTSGM

SEQ ID NO: 2437 - protein, 5 aa, Artificial Sequence
  source: /note="Description of Artificial Sequence: Synthetic peptide"
WWDDK

SEQ ID NO: 2438 - protein, 162 aa, Artificial Sequence; identical to SEQ ID NO: 2435
  source: /note="Description of Artificial Sequence: Synthetic polypeptide"

SEQ ID NO: 2439 - protein, 272 aa, Artificial Sequence
  source: /note="Description of Artificial Sequence: Synthetic polypeptide"
QVTLRESGPALVKPTQTLTLTCTFSGFSLSTSGMSVGWIRQPPGKALEWLADIWWDDKKDYNPSLKSRLTISKDTSKNQVVLKVTNMDPADTATYYCARSMITLKTLNLGSCVIATNLQEIRNGFSEIRGSVQAKDGNIDIRILRRTESLQDTKPANRCCLLRHLLRLYLDRVFKNYQTPDHYTLRKISSLANSFLTIKKDLRLCHAHMTCHCGEEAMKKYSQILSHFEKLEPQAAVVKALGELDILLQWMEETENWYFDVWGAGTTVTVSS

SEQ ID NO: 2440 - protein, 602 aa, Artificial Sequence
  source: /note="Description of Artificial Sequence: Synthetic polypeptide"
QVTLRESGPALVKPTQTLTLTCTFSGFSLSTSGMSVGWIRQPPGKALEWLADIWWDDKKDYNPSLKSRLTISKDTSKNQVVLKVTNMDPADTATYYCARSMITLKTLNLGSCVIATNLQEIRNGFSEIRGSVQAKDGNIDIRILRRTESLQDTKPANRCCLLRHLLRLYLDRVFKNYQTPDHYTLRKISSLANSFLTIKKDLRLCHAHMTCHCGEEAMKKYSQILSHFEKLEPQAAVVKALGELDILLQWMEETENWYFDVWGAGTTVTVSSASTKGPSVFPLAPSSKSTSGGTAALGCLVKDYFPEPVTVSWNSGALTSGVHTFPAVLQSSGLYSLSSVVTVPSSSLGTQTYICNVNHKPSNTKVDKRVEPKSCDKTHTCPPCPAPELLGGPSVFLFPPKPKDTLMISRTPEVTCVVVAVSHEDPEVKFNWYVDGVEVHNAKTKPREEQYNSTYRVVSVLTVLHQDWLNGKEYKCKVSNKALAAPIEKTISKAKGQPREPQVYTLPPSREEMTKNQVSLTCLVKGFYPSDIAVEWESNGQPENNYKTTPPVLDSDGSFFLYSKLTVDKSRWQQGNVFSCSVMHEALHNHYTQKSLSLSPGK

SEQ ID NO: 2441 - protein, 10 aa, Artificial Sequence
  source: /note="Description of Artificial Sequence: Synthetic peptide"
KAQLSVGYMH

SEQ ID NO: 2442 - protein, 7 aa, Artificial Sequence
  source: /note="Description of Artificial Sequence: Synthetic peptide"
DTSKLAS

SEQ ID NO: 2443 - protein, 9 aa, Artificial Sequence
  source: /note="Description of Artificial Sequence: Synthetic peptide"
FQGSGYPFT

SEQ ID NO: 2444 - protein, 6 aa, Artificial Sequence
  source: /note="Description of Artificial Sequence: Synthetic peptide"
QLSVGY

SEQ ID NO: 2445 - protein, 3 aa, Artificial Sequence
  source: /note="Description of Artificial Sequence: Synthetic peptide"
DTS

SEQ ID NO: 2446 - protein, 6 aa, Artificial Sequence
  source: /note="Description of Artificial Sequence: Synthetic peptide"
GSGYPF

SEQ ID NO: 2447 - protein, 106 aa, Artificial Sequence; identical to SEQ ID NO: 15
  source: /note="Description of Artificial Sequence: Synthetic polypeptide"

SEQ ID NO: 2448 - protein, 213 aa, Artificial Sequence; identical to SEQ ID NO: 16
  source: /note="Description of Artificial Sequence: Synthetic polypeptide"

SEQ ID NO: 2449 - protein, 7 aa, Artificial Sequence
  source: /note="Description of Artificial Sequence: Synthetic peptide"
TSGMSVG

SEQ ID NO: 2450 - protein, 15 aa, Artificial Sequence
  source: /note="Description of Artificial Sequence: Synthetic peptide"
DIWWDDKKDYNPSLK

SEQ ID NO: 2451 - protein, 10 aa, Artificial Sequence
  source: /note="Description of Artificial Sequence: Synthetic peptide"
SMITNWYFDV

SEQ ID NO: 2452 - protein, 9 aa, Artificial Sequence
  source: /note="Description of Artificial Sequence: Synthetic peptide"
GFSLSTSGM

SEQ ID NO: 2453 - protein, 5 aa, Artificial Sequence
  source: /note="Description of Artificial Sequence: Synthetic peptide"
WWDDK

SEQ ID NO: 2454 - protein, 10 aa, Artificial Sequence
  source: /note="Description of Artificial Sequence: Synthetic peptide"
SMITNWYFDV

SEQ ID NO: 2455 - protein, 120 aa, Artificial Sequence; identical to SEQ ID NO: 55
  source: /note="Description of Artificial Sequence: Synthetic polypeptide"

SEQ ID NO: 2456 - protein, 450 aa, Artificial Sequence; identical to SEQ ID NO: 56
  source: /note="Description of Artificial Sequence: Synthetic polypeptide"

SEQ ID NO: 2457 - protein, 10 aa, Artificial Sequence
  source: /note="Description of Artificial Sequence: Synthetic peptide"
KAQLSVGYMH

SEQ ID NO: 2458 - protein, 159 aa, Artificial Sequence
  source: /note="Description of Artificial Sequence: Synthetic polypeptide"
DTLKTLNLGSCVIATNLQEIRNGFSEIRGSVQAKDGNIDIRILRRTESLQDTKPANRCCLLRHLLRLYLDRVFKNYQTPDHYTLRKISSLANSFLTIKKDLRLCHAHMTCHCGEEAMKKYSQILSHFEKLEPQAAVVKALGELDILLQWMEETESKLAS

SEQ ID NO: 2459 - protein, 9 aa, Artificial Sequence
  source: /note="Description of Artificial Sequence: Synthetic peptide"
FQGSGYPFT

SEQ ID NO: 2460 - protein, 6 aa, Artificial Sequence
  source: /note="Description of Artificial Sequence: Synthetic peptide"
QLSVGY

SEQ ID NO: 2461 - protein, 155 aa, Artificial Sequence
  source: /note="Description of Artificial Sequence: Synthetic polypeptide"
DTLKTLNLGSCVIATNLQEIRNGFSEIRGSVQAKDGNIDIRILRRTESLQDTKPANRCCLLRHLLRLYLDRVFKNYQTPDHYTLRKISSLANSFLTIKKDLRLCHAHMTCHCGEEAMKKYSQILSHFEKLEPQAAVVKALGELDILLQWMEETES

SEQ ID NO: 2462 - protein, 6 aa, Artificial Sequence
  source: /note="Description of Artificial Sequence: Synthetic peptide"
GSGYPF

SEQ ID NO: 2463 - protein, 258 aa, Artificial Sequence
  source: /note="Description of Artificial Sequence: Synthetic polypeptide"
DIQMTQSPSTLSASVGDRVTITCKAQLSVGYMHWYQQKPGKAPKLLIYDTLKTLNLGSCVIATNLQEIRNGFSEIRGSVQAKDGNIDIRILRRTESLQDTKPANRCCLLRHLLRLYLDRVFKNYQTPDHYTLRKISSLANSFLTIKKDLRLCHAHMTCHCGEEAMKKYSQILSHFEKLEPQAAVVKALGELDILLQWMEETESKLASGVPSRFSGSGSGTEFTLTISSLQPDDFATYYCFQGSGYPFTFGGGTKLEIK

SEQ ID NO: 2464 - protein, 365 aa, Artificial Sequence
  source: /note="Description of Artificial Sequence: Synthetic polypeptide"
DIQMTQSPSTLSASVGDRVTITCKAQLSVGYMHWYQQKPGKAPKLLIYDTLKTLNLGSCVIATNLQEIRNGFSEIRGSVQAKDGNIDIRILRRTESLQDTKPANRCCLLRHLLRLYLDRVFKNYQTPDHYTLRKISSLANSFLTIKKDLRLCHAHMTCHCGEEAMKKYSQILSHFEKLEPQAAVVKALGELDILLQWMEETESKLASGVPSRFSGSGSGTEFTLTISSLQPDDFATYYCFQGSGYPFTFGGGTKLEIKRTVAAPSVFIFPPSDEQLKSGTASVVCLLNNFYPREAKVQWKVDNALQSGNSQESVTEQDSKDSTYSLSSTLTLSKADYEKHKVYACEVTHQGLSSPVTKSFNRGEC

SEQ ID NO: 2465 - protein, 7 aa, Artificial Sequence
  source: /note="Description of Artificial Sequence: Synthetic peptide"
TSGMSVG

SEQ ID NO: 2466 - protein, 15 aa, Artificial Sequence
  source: /note="Description of Artificial Sequence: Synthetic peptide"
DIWWDDKKDYNPSLK

SEQ ID NO: 2467 - protein, 10 aa, Artificial Sequence
  source: /note="Description of Artificial Sequence: Synthetic peptide"
SMITNWYFDV

SEQ ID NO: 2468 - protein, 9 aa, Artificial Sequence
  source: /note="Description of Artificial Sequence: Synthetic peptide"
GFSLSTSGM

SEQ ID NO: 2469 - protein, 5 aa, Artificial Sequence
  source: /note="Description of Artificial Sequence: Synthetic peptide"
WWDDK

SEQ ID NO: 2470 - protein, 10 aa, Artificial Sequence
  source: /note="Description of Artificial Sequence: Synthetic peptide"
SMITNWYFDV

SEQ ID NO: 2471 - protein, 120 aa, Artificial Sequence; identical to SEQ ID NO: 55
  source: /note="Description of Artificial Sequence: Synthetic polypeptide"

SEQ ID NO: 2472 - protein, 450 aa, Artificial Sequence; identical to SEQ ID NO: 56
  source: /note="Description of Artificial Sequence: Synthetic polypeptide"

SEQ ID NO: 2473 - protein, 10 aa, Artificial Sequence
  source: /note="Description of Artificial Sequence: Synthetic peptide"
KAQLSVGYMH

SEQ ID NO: 2474 - protein, 159 aa, Artificial Sequence; identical to SEQ ID NO: 2458
  source: /note="Description of Artificial Sequence: Synthetic polypeptide"

SEQ ID NO: 2475 - protein, 9 aa, Artificial Sequence
  source: /note="Description of Artificial Sequence: Synthetic peptide"
FQGSGYPFT

SEQ ID NO: 2476 - protein, 6 aa, Artificial Sequence
  source: /note="Description of Artificial Sequence: Synthetic peptide"
QLSVGY

SEQ ID NO: 2477 - protein, 155 aa, Artificial Sequence; identical to SEQ ID NO: 2461
  source: /note="Description of Artificial Sequence: Synthetic polypeptide"

SEQ ID NO: 2478 - protein, 6 aa, Artificial Sequence
  source: /note="Description of Artificial Sequence: Synthetic peptide"
GSGYPF

SEQ ID NO: 2479 - protein, 258 aa, Artificial Sequence; identical to SEQ ID NO: 2463
  source: /note="Description of Artificial Sequence: Synthetic polypeptide"

SEQ ID NO: 2480 - protein, 365 aa, Artificial Sequence; identical to SEQ ID NO: 2464
  source: /note="Description of Artificial Sequence: Synthetic polypeptide"

SEQ ID NO: 2481 - protein, 7 aa, Artificial Sequence
  source: /note="Description of Artificial Sequence: Synthetic peptide"
TSGMSVG

SEQ ID NO: 2482 - protein, 15 aa, Artificial Sequence
  source: /note="Description of Artificial Sequence: Synthetic peptide"
DIWWDDKKDYNPSLK

SEQ ID NO: 2483 - protein, 10 aa, Artificial Sequence
  source: /note="Description of Artificial Sequence: Synthetic peptide"
SMITNWYFDV

SEQ ID NO: 2484 - protein, 9 aa, Artificial Sequence
  source: /note="Description of Artificial Sequence: Synthetic peptide"
GFSLSTSGM

SEQ ID NO: 2485 - protein, 5 aa, Artificial Sequence
  source: /note="Description of Artificial Sequence: Synthetic peptide"
WWDDK

SEQ ID NO: 2486 - protein, 10 aa, Artificial Sequence
  source: /note="Description of Artificial Sequence: Synthetic peptide"
SMITNWYFDV

SEQ ID NO: 2487 - protein, 120 aa, Artificial Sequence; identical to SEQ ID NO: 55
  source: /note="Description of Artificial Sequence: Synthetic polypeptide"

SEQ ID NO: 2488 - protein, 450 aa, Artificial Sequence; identical to SEQ ID NO: 56
  source: /note="Description of Artificial Sequence: Synthetic polypeptide"

SEQ ID NO: 2489 - protein, 10 aa, Artificial Sequence
  source: /note="Description of Artificial Sequence: Synthetic peptide"
KAQLSVGYMH

SEQ ID NO: 2490 - protein, 7 aa, Artificial Sequence
  source: /note="Description of Artificial Sequence: Synthetic peptide"
DTSKLAS

SEQ ID NO: 2491 - protein, 161 aa, Artificial Sequence
  source: /note="Description of Artificial Sequence: Synthetic polypeptide"
FQGSGLKTLNLGSCVIATNLQEIRNGFSEIRGSVQAKDGNIDIRILRRTESLQDTKPANRCCLLRHLLRLYLDRVFKNYQTPDHYTLRKISSLANSFLTIKKDLRLCHAHMTCHCGEEAMKKYSQILSHFEKLEPQAAVVKALGELDILLQWMEETEYPFT

SEQ ID NO: 2492 - protein, 6 aa, Artificial Sequence
  source: /note="Description of Artificial Sequence: Synthetic peptide"
QLSVGY

SEQ ID NO: 2493 - protein, 3 aa, Artificial Sequence
  source: /note="Description of Artificial Sequence: Synthetic peptide"
DTS

SEQ ID NO: 2494 - protein, 158 aa, Artificial Sequence
  source: /note="Description of Artificial Sequence: Synthetic polypeptide"
GSGLKTLNLGSCVIATNLQEIRNGFSEIRGSVQAKDGNIDIRILRRTESLQDTKPANRCCLLRHLLRLYLDRVFKNYQTPDHYTLRKISSLANSFLTIKKDLRLCHAHMTCHCGEEAMKKYSQILSHFEKLEPQAAVVKALGELDILLQWMEETEYPF

SEQ ID NO: 2495 - protein, 258 aa, Artificial Sequence
  source: /note="Description of Artificial Sequence: Synthetic polypeptide"
DIQMTQSPSTLSASVGDRVTITCKAQLSVGYMHWYQQKPGKAPKLLIYDTSKLASGVPSRFSGSGSGTEFTLTISSLQPDDFATYYCFQGSGLKTLNLGSCVIATNLQEIRNGFSEIRGSVQAKDGNIDIRILRRTESLQDTKPANRCCLLRHLLRLYLDRVFKNYQTPDHYTLRKISSLANSFLTIKKDLRLCHAHMTCHCGEEAMKKYSQILSHFEKLEPQAAVVKALGELDILLQWMEETEYPFTFGGGTKLEIK

SEQ ID NO: 2496 - protein, 365 aa, Artificial Sequence
  source: /note="Description of Artificial Sequence: Synthetic polypeptide"
DIQMTQSPSTLSASVGDRVTITCKAQLSVGYMHWYQQKPGKAPKLLIYDTSKLASGVPSRFSGSGSGTEFTLTISSLQPDDFATYYCFQGSGLKTLNLGSCVIATNLQEIRNGFSEIRGSVQAKDGNIDIRILRRTESLQDTKPANRCCLLRHLLRLYLDRVFKNYQTPDHYTLRKISSLANSFLTIKKDLRLCHAHMTCHCGEEAMKKYSQILSHFEKLEPQAAVVKALGELDILLQWMEETEYPFTFGGGTKLEIKRTVAAPSVFIFPPSDEQLKSGTASVVCLLNNFYPREAKVQWKVDNALQSGNSQESVTEQDSKDSTYSLSSTLTLSKADYEKHKVYACEVTHQGLSSPVTKSFNRGEC

SEQ ID NO: 2497 - protein, 153 aa, Artificial Sequence
  source: /note="Description of Artificial Sequence: Synthetic polypeptide"
PISSHCRLDKSNFQQPYITNRTFMLAKEASLADNNTDVRLIGEKLFHGVSMSERCYLMKQVLNFTLEEVLFPQSDRFQPYMQEVVPFLARLSNRLSTCHIEGDDLHIQRNVQKLKDTVKKLGESGEIKAIGELDLLFMSLRNACISTSGMSVG

SEQ ID NO: 2498 - protein, 16 aa, Artificial Sequence
  source: /note="Description of Artificial Sequence: Synthetic peptide"
DIWWDDKKDYNPSLKS

SEQ ID NO: 2499 - protein, 10 aa, Artificial Sequence
  source: /note="Description of Artificial Sequence: Synthetic peptide"
SMITNWYFDV

SEQ ID NO: 2500 - protein, 155 aa, Artificial Sequence
  source: /note="Description of Artificial Sequence: Synthetic polypeptide"
GFSLAPISSHCRLDKSNFQQPYITNRTFMLAKEASLADNNTDVRLIGEKLFHGVSMSERCYLMKQVLNFTLEEVLFPQSDRFQPYMQEVVPFLARLSNRLSTCHIEGDDLHIQRNVQKLKDTVKKLGESGEIKAIGELDLLFMSLRNACISTSGM

SEQ ID NO: 2501 - protein, 5 aa, Artificial Sequence
  source: /note="Description of Artificial Sequence: Synthetic peptide"
WWDDK

SEQ ID NO: 2502 - protein, 10 aa, Artificial Sequence
  source: /note="Description of Artificial Sequence: Synthetic peptide"
SMITNWYFDV

SEQ ID NO: 2503 - protein, 266 aa, Artificial Sequence
  source: /note="Description of Artificial Sequence: Synthetic polypeptide"
QVTLRESGPALVKPTQTLTLTCTFSGFSLAPISSHCRLDKSNFQQPYITNRTFMLAKEASLADNNTDVRLIGEKLFHGVSMSERCYLMKQVLNFTLEEVLFPQSDRFQPYMQEVVPFLARLSNRLSTCHIEGDDLHIQRNVQKLKDTVKKLGESGEIKAIGELDLLFMSLRNACISTSGMSVGWIRQPPGKALEWLADIWWDDKKDYNPSLKSRLTISKDTSKNQVVLKVTNMDPADTATYYCARSMITNWYFDVWGAGTTVTVSS

SEQ ID NO: 2504 - protein, 596 aa, Artificial Sequence
  source: /note="Description of Artificial Sequence: Synthetic polypeptide"
QVTLRESGPALVKPTQTLTLTCTFSGFSLAPISSHCRLDKSNFQQPYITNRTFMLAKEASLADNNTDVRLIGEKLFHGVSMSERCYLMKQVLNFTLEEVLFPQSDRFQPYMQEVVPFLARLSNRLSTCHIEGDDLHIQRNVQKLKDTVKKLGESGEIKAIGELDLLFMSLRNACISTSGMSVGWIRQPPGKALEWLADIWWDDKKDYNPSLKSRLTISKDTSKNQVVLKVTNMDPADTATYYCARSMITNWYFDVWGAGTTVTVSSASTKGPSVFPLAPSSKSTSGGTAALGCLVKDYFPEPVTVSWNSGALTSGVHTFPAVLQSSGLYSLSSVVTVPSSSLGTQTYICNVNHKPSNTKVDKRVEPKSCDKTHTCPPCPAPELLGGPSVFLFPPKPKDTLMISRTPEVTCVVVAVSHEDPEVKFNWYVDGVEVHNAKTKPREEQYNSTYRVVSVLTVLHQDWLNGKEYKCKVSNKALAAPIEKTISKAKGQPREPQVYTLPPSREEMTKNQVSLTCLVKGFYPSDIAVEWESNGQPENNYKTTPPVLDSDGSFFLYSKLTVDKSRWQQGNVFSCSVMHEALHNHYTQKSLSLSPGK

SEQ ID NO: 2505 - protein, 10 aa, Artificial Sequence
  source: /note="Description of Artificial Sequence: Synthetic peptide"
KAQLSVGYMH

SEQ ID NO: 2506 - protein, 7 aa, Artificial Sequence
  source: /note="Description of Artificial Sequence: Synthetic peptide"
DTSKLAS

SEQ ID NO: 2507 - protein, 9 aa, Artificial Sequence
  source: /note="Description of Artificial Sequence: Synthetic peptide"
FQGSGYPFT

SEQ ID NO: 2508 - protein, 6 aa, Artificial Sequence
  source: /note="Description of Artificial Sequence: Synthetic peptide"
QLSVGY

SEQ ID NO: 2509 - protein, 3 aa, Artificial Sequence
  source: /note="Description of Artificial Sequence: Synthetic peptide"
DTS

SEQ ID NO: 2510 - protein, 6 aa, Artificial Sequence
  source: /note="Description of Artificial Sequence: Synthetic peptide"
GSGYPF

SEQ ID NO: 2511 - protein, 106 aa, Artificial Sequence; identical to SEQ ID NO: 15
  source: /note="Description of Artificial Sequence: Synthetic polypeptide"

SEQ ID NO: 2512 - protein, 213 aa, Artificial Sequence; identical to SEQ ID NO: 16
  source: /note="Description of Artificial Sequence: Synthetic polypeptide"

SEQ ID NO: 2513 - protein, 7 aa, Artificial Sequence
  source: /note="Description of Artificial Sequence: Synthetic peptide"
TSGMSVG

SEQ ID NO: 2514 - protein, 162 aa, Artificial Sequence
  source: /note="Description of Artificial Sequence: Synthetic polypeptide"
DIWWDAPISSHCRLDKSNFQQPYITNRTFMLAKEASLADNNTDVRLIGEKLFHGVSMSERCYLMKQVLNFTLEEVLFPQSDRFQPYMQEVVPFLARLSNRLSTCHIEGDDLHIQRNVQKLKDTVKKLGESGEIKAIGELDLLFMSLRNACIDKKDYNPSLKS

SEQ ID NO: 2515 - protein, 10 aa, Artificial Sequence
  source: /note="Description of Artificial Sequence: Synthetic peptide"
SMITNWYFDV

SEQ ID NO: 2516 - protein, 9 aa, Artificial Sequence
  source: /note="Description of Artificial Sequence: Synthetic peptide"
GFSLSTSGM

SEQ ID NO: 2517 - protein, 151 aa, Artificial Sequence
  source: /note="Description of Artificial Sequence: Synthetic polypeptide"
WWDAPISSHCRLDKSNFQQPYITNRTFMLAKEASLADNNTDVRLIGEKLFHGVSMSERCYLMKQVLNFTLEEVLFPQSDRFQPYMQEVVPFLARLSNRLSTCHIEGDDLHIQRNVQKLKDTVKKLGESGEIKAIGELDLLFMSLRNACIDK

SEQ ID NO: 2518 - protein, 10 aa, Artificial Sequence
  source: /note="Description of Artificial Sequence: Synthetic peptide"
SMITNWYFDV

SEQ ID NO: 2519 - protein, 266 aa, Artificial Sequence
  source: /note="Description of Artificial Sequence: Synthetic polypeptide"
QVTLRESGPALVKPTQTLTLTCTFSGFSLSTSGMSVGWIRQPPGKALEWLADIWWDAPISSHCRLDKSNFQQPYITNRTFMLAKEASLADNNTDVRLIGEKLFHGVSMSERCYLMKQVLNFTLEEVLFPQSDRFQPYMQEVVPFLARLSNRLSTCHIEGDDLHIQRNVQKLKDTVKKLGESGEIKAIGELDLLFMSLRNACIDKKDYNPSLKSRLTISKDTSKNQVVLKVTNMDPADTATYYCARSMITNWYFDVWGAGTTVTVSS

SEQ ID NO: 2520 - protein, 596 aa, Artificial Sequence
  source: /note="Description of Artificial Sequence: Synthetic polypeptide"
QVTLRESGPALVKPTQTLTLTCTFSGFSLSTSGMSVGWIRQPPGKALEWLADIWWDAPISSHCRLDKSNFQQPYITNRTFMLAKEASLADNNTDVRLIGEKLFHGVSMSERCYLMKQVLNFTLEEVLFPQSDRFQPYMQEVVPFLARLSNRLSTCHIEGDDLHIQRNVQKLKDTVKKLGESGEIKAIGELDLLFMSLRNACIDKKDYNPSLKSRLTISKDTSKNQVVLKVTNMDPADTATYYCARSMITNWYFDVWGAGTTVTVSSASTKGPSVFPLAPSSKSTSGGTAALGCLVKDYFPEPVTVSWNSGALTSGVHTFPAVLQSSGLYSLSSVVTVPSSSLGTQTYICNVNHKPSNTKVDKRVEPKSCDKTHTCPPCPAPELLGGPSVFLFPPKPKDTLMISRTPEVTCVVVAVSHEDPEVKFNWYVDGVEVHNAKTKPREEQYNSTYRVVSVLTVLHQDWLNGKEYKCKVSNKALAAPIEKTISKAKGQPREPQVYTLPPSREEMTKNQVSLTCLVKGFYPSDIAVEWESNGQPENNYKTTPPVLDSDGSFFLYSKLTVDKSRWQQGNVFSCSVMHEALHNHYTQKSLSLSPGK

SEQ ID NO: 2521 - protein, 10 aa, Artificial Sequence
  source: /note="Description of Artificial Sequence: Synthetic peptide"
KAQLSVGYMH

SEQ ID NO: 2522 - protein, 7 aa, Artificial Sequence
  source: /note="Description of Artificial Sequence: Synthetic peptide"
DTSKLAS

SEQ ID NO: 2523 - protein, 9 aa, Artificial Sequence
  source: /note="Description of Artificial Sequence: Synthetic peptide"
FQGSGYPFT

SEQ ID NO: 2524 - protein, 6 aa, Artificial Sequence
  source: /note="Description of Artificial Sequence: Synthetic peptide"
QLSVGY

SEQ ID NO: 2525 - protein, 3 aa, Artificial Sequence
  source: /note="Description of Artificial Sequence: Synthetic peptide"
DTS

SEQ ID NO: 2526 - protein, 6 aa, Artificial Sequence
  source: /note="Description of Artificial Sequence: Synthetic peptide"
GSGYPF

SEQ ID NO: 2527 - protein, 106 aa, Artificial Sequence; identical to SEQ ID NO: 15
  source: /note="Description of Artificial Sequence: Synthetic polypeptide"

SEQ ID NO: 2528 - protein, 213 aa, Artificial Sequence; identical to SEQ ID NO: 16
  source: /note="Description of Artificial Sequence: Synthetic polypeptide"

SEQ ID NO: 2529 - protein, 7 aa, Artificial Sequence
  source: /note="Description of Artificial Sequence: Synthetic peptide"
TSGMSVG

SEQ ID NO: 2530 - protein, 16 aa, Artificial Sequence
  source: /note="Description of Artificial Sequence: Synthetic peptide"
DIWWDDKKDYNPSLKS

SEQ ID NO: 2531 - protein, 156 aa, Artificial Sequence
  source: /note="Description of Artificial Sequence: Synthetic polypeptide"
SMITAPISSHCRLDKSNFQQPYITNRTFMLAKEASLADNNTDVRLIGEKLFHGVSMSERCYLMKQVLNFTLEEVLFPQSDRFQPYMQEVVPFLARLSNRLSTCHIEGDDLHIQRNVQKLKDTVKKLGESGEIKAIGELDLLFMSLRNACINWYFDV

SEQ ID NO: 2532 - protein, 9 aa, Artificial Sequence
  source: /note="Description of Artificial Sequence: Synthetic peptide"
GFSLSTSGM

SEQ ID NO: 2533 - protein, 5 aa, Artificial Sequence
  source: /note="Description of Artificial Sequence: Synthetic peptide"
WWDDK

SEQ ID NO: 2534 - protein, 156 aa, Artificial Sequence; identical to SEQ ID NO: 2531
  source: /note="Description of Artificial Sequence: Synthetic polypeptide"

SEQ ID NO: 2535 - protein, 266 aa, Artificial Sequence
  source: /note="Description of Artificial Sequence: Synthetic polypeptide"
QVTLRESGPALVKPTQTLTLTCTFSGFSLSTSGMSVGWIRQPPGKALEWLADIWWDDKKDYNPSLKSRLTISKDTSKNQVVLKVTNMDPADTATYYCARSMITAPISSHCRLDKSNFQQPYITNRTFMLAKEASLADNNTDVRLIGEKLFHGVSMSERCYLMKQVLNFTLEEVLFPQSDRFQPYMQEVVPFLARLSNRLSTCHIEGDDLHIQRNVQKLKDTVKKLGESGEIKAIGELDLLFMSLRNACINWYFDVWGAGTTVTVSS

SEQ ID NO: 2536 - protein, 596 aa, Artificial Sequence
  source: /note="Description of Artificial Sequence: Synthetic polypeptide"
QVTLRESGPALVKPTQTLTLTCTFSGFSLSTSGMSVGWIRQPPGKALEWLADIWWDDKKDYNPSLKSRLTISKDTSKNQVVLKVTNMDPADTATYYCARSMITAPISSHCRLDKSNFQQPYITNRTFMLAKEASLADNNTDVRLIGEKLFHGVSMSERCYLMKQVLNFTLEEVLFPQSDRFQPYMQEVVPFLARLSNRLSTCHIEGDDLHIQRNVQKLKDTVKKLGESGEIKAIGELDLLFMSLRNACINWYFDVWGAGTTVTVSSASTKGPSVFPLAPSSKSTSGGTAALGCLVKDYFPEPVTVSWNSGALTSGVHTFPAVLQSSGLYSLSSVVTVPSSSLGTQTYICNVNHKPSNTKVDKRVEPKSCDKTHTCPPCPAPELLGGPSVFLFPPKPKDTLMISRTPEVTCVVVAVSHEDPEVKFNWYVDGVEVHNAKTKPREEQYNSTYRVVSVLTVLHQDWLNGKEYKCKVSNKALAAPIEKTISKAKGQPREPQVYTLPPSREEMTKNQVSLTCLVKGFYPSDIAVEWESNGQPENNYKTTPPVLDSDGSFFLYSKLTVDKSRWQQGNVFSCSVMHEALHNHYTQKSLSLSPGK

SEQ ID NO: 2537 - protein, 10 aa, Artificial Sequence
  source: /note="Description of Artificial Sequence: Synthetic peptide"
KAQLSVGYMH

SEQ ID NO: 2538 - protein, 7 aa, Artificial Sequence
  source: /note="Description of Artificial Sequence: Synthetic peptide"
DTSKLAS

SEQ ID NO: 2539 - protein, 9 aa, Artificial Sequence
  source: /note="Description of Artificial Sequence: Synthetic peptide"
FQGSGYPFT

SEQ ID NO: 2540 - protein, 6 aa, Artificial Sequence
  source: /note="Description of Artificial Sequence: Synthetic peptide"
QLSVGY

SEQ ID NO: 2541 - protein, 3 aa, Artificial Sequence
  source: /note="Description of Artificial Sequence: Synthetic peptide"
DTS

SEQ ID NO: 2542 - protein, 6 aa, Artificial Sequence
  source: /note="Description of Artificial Sequence: Synthetic peptide"
GSGYPF

SEQ ID NO: 2543 - protein, 106 aa, Artificial Sequence; identical to SEQ ID NO: 15
  source: /note="Description of Artificial Sequence: Synthetic polypeptide"

SEQ ID NO: 2544 - protein, 213 aa, Artificial Sequence; identical to SEQ ID NO: 16
  source: /note="Description of Artificial Sequence: Synthetic polypeptide"

SEQ ID NO: 2545 - protein, 7 aa, Artificial Sequence
  source: /note="Description of Artificial Sequence: Synthetic peptide"
TSGMSVG

SEQ ID NO: 2546 - protein, 15 aa, Artificial Sequence
  source: /note="Description of Artificial Sequence: Synthetic peptide"
DIWWDDKKDYNPSLK

SEQ ID NO: 2547 - protein, 10 aa, Artificial Sequence
  source: /note="Description of Artificial Sequence: Synthetic peptide"
SMITNWYFDV

SEQ ID NO: 2548 - protein, 9 aa, Artificial Sequence
  source: /note="Description of Artificial Sequence: Synthetic peptide"
GFSLSTSGM

SEQ ID NO: 2549 - protein, 5 aa, Artificial Sequence
  source: /note="Description of Artificial Sequence: Synthetic peptide"
WWDDK

SEQ ID NO: 2550 - protein, 10 aa, Artificial Sequence
  source: /note="Description of Artificial Sequence: Synthetic peptide"
SMITNWYFDV

SEQ ID NO: 2551 - protein, 120 aa, Artificial Sequence; identical to SEQ ID NO: 55
  source: /note="Description of Artificial Sequence: Synthetic polypeptide"

SEQ ID NO: 2552 - protein, 450 aa, Artificial Sequence; identical to SEQ ID NO: 56
  source: /note="Description of Artificial Sequence: Synthetic polypeptide"

SEQ ID NO: 2553 - protein, 156 aa, Artificial Sequence
  source: /note="Description of Artificial Sequence: Synthetic polypeptide"
KAQLSAPISSHCRLDKSNFQQPYITNRTFMLAKEASLADNNTDVRLIGEKLFHGVSMSERCYLMKQVLNFTLEEVLFPQSDRFQPYMQEVVPFLARLSNRLSTCHIEGDDLHIQRNVQKLKDTVKKLGESGEIKAIGELDLLFMSLRNACIVGYMH

SEQ ID NO: 2554 - protein, 7 aa, Artificial Sequence
  source: /note="Description of Artificial Sequence: Synthetic peptide"
DTSKLAS

SEQ ID NO: 2555 - protein, 9 aa, Artificial Sequence
  source: /note="Description of Artificial Sequence: Synthetic peptide"
FQGSGYPFT

SEQ ID NO: 2556 - protein, 152 aa, Artificial Sequence
  source: /note="Description of Artificial Sequence: Synthetic polypeptide"
QLSAPISSHCRLDKSNFQQPYITNRTFMLAKEASLADNNTDVRLIGEKLFHGVSMSERCYLMKQVLNFTLEEVLFPQSDRFQPYMQEVVPFLARLSNRLSTCHIEGDDLHIQRNVQKLKDTVKKLGESGEIKAIGELDLLFMSLRNACIVGY

SEQ ID NO: 2557 - protein, 3 aa, Artificial Sequence
  source: /note="Description of Artificial Sequence: Synthetic peptide"
DTS

SEQ ID NO: 2558 - protein, 6 aa, Artificial Sequence
  source: /note="Description of Artificial Sequence: Synthetic peptide"
GSGYPF

SEQ ID NO: 2559 - protein, 252 aa, Artificial Sequence
  source: /note="Description of Artificial Sequence: Synthetic polypeptide"
DIQMTQSPSTLSASVGDRVTITCKAQLSAPISSHCRLDKSNFQQPYITNRTFMLAKEASLADNNTDVRLIGEKLFHGVSMSERCYLMKQVLNFTLEEVLFPQSDRFQPYMQEVVPFLARLSNRLSTCHIEGDDLHIQRNVQKLKDTVKKLGESGEIKAIGELDLLFMSLRNACIVGYMHWYQQKPGKAPKLLIYDTSKLASGVPSRFSGSGSGTEFTLTISSLQPDDFATYYCFQGSGYPFTFGGGTKLEIK

SEQ ID NO: 2560 - protein, 359 aa, Artificial Sequence
  source: /note="Description of Artificial Sequence: Synthetic polypeptide"
DIQMTQSPSTLSASVGDRVTITCKAQLSAPISSHCRLDKSNFQQPYITNRTFMLAKEASLADNNTDVRLIGEKLFHGVSMSERCYLMKQVLNFTLEEVLFPQSDRFQPYMQEVVPFLARLSNRLSTCHIEGDDLHIQRNVQKLKDTVKKLGESGEIKAIGELDLLFMSLRNACIVGYMHWYQQKPGKAPKLLIYDTSKLASGVPSRFSGSGSGTEFTLTISSLQPDDFATYYCFQGSGYPFTFGGGTKLEIKRTVAAPSVFIFPPSDEQLKSGTASVVCLLNNFYPREAKVQWKVDNALQSGNSQESVTEQDSKDSTYSLSSTLTLSKADYEKHKVYACEVTHQGLSSPVTKSFNRGEC

SEQ ID NO: 2561 - protein, 7 aa, Artificial Sequence
  source: /note="Description of Artificial Sequence: Synthetic peptide"
TSGMSVG

SEQ ID NO: 2562 - protein, 15 aa, Artificial Sequence
  source: /note="Description of Artificial Sequence: Synthetic peptide"
DIWWDDKKDYNPSLK

SEQ ID NO: 2563 - protein, 10 aa, Artificial Sequence
  source: /note="Description of Artificial Sequence: Synthetic peptide"
SMITNWYFDV

SEQ ID NO: 2564 - protein, 9 aa, Artificial Sequence
  source: /note="Description of Artificial Sequence: Synthetic peptide"
GFSLSTSGM

SEQ ID NO: 2565 - protein, 5 aa, Artificial Sequence
  source: /note="Description of Artificial Sequence: Synthetic peptide"
WWDDK

SEQ ID NO: 2566 - protein, 10 aa, Artificial Sequence
  source: /note="Description of Artificial Sequence: Synthetic peptide"
SMITNWYFDV

SEQ ID NO: 2567 - protein, 120 aa, Artificial Sequence; identical to SEQ ID NO: 55
  source: /note="Description of Artificial Sequence: Synthetic polypeptide"

SEQ ID NO: 2568 - protein, 450 aa, Artificial Sequence; identical to SEQ ID NO: 56
  source: /note="Description of Artificial Sequence: Synthetic polypeptide"

SEQ ID NO: 2569 - protein, 10 aa, Artificial Sequence
  source: /note="Description of Artificial Sequence: Synthetic peptide"
KAQLSVGYMH

SEQ ID NO: 2570 - protein, 153 aa, Artificial Sequence
  source: /note="Description of Artificial Sequence: Synthetic polypeptide"
DTAPISSHCRLDKSNFQQPYITNRTFMLAKEASLADNNTDVRLIGEKLFHGVSMSERCYLMKQVLNFTLEEVLFPQSDRFQPYMQEVVPFLARLSNRLSTCHIEGDDLHIQRNVQKLKDTVKKLGESGEIKAIGELDLLFMSLRNACISKLAS

SEQ ID NO: 2571 - protein, 9 aa, Artificial Sequence
  source: /note="Description of Artificial Sequence: Synthetic peptide"
FQGSGYPFT

SEQ ID NO: 2572 - protein, 6 aa, Artificial Sequence
  source: /note="Description of Artificial Sequence: Synthetic peptide"
QLSVGY

SEQ ID NO: 2573 - protein, 149 aa, Artificial Sequence
  source: /note="Description of Artificial Sequence: Synthetic polypeptide"
DTAPISSHCRLDKSNFQQPYITNRTFMLAKEASLADNNTDVRLIGEKLFHGVSMSERCYLMKQVLNFTLEEVLFPQSDRFQPYMQEVVPFLARLSNRLSTCHIEGDDLHIQRNVQKLKDTVKKLGESGEIKAIGELDLLFMSLRNACIS

SEQ ID NO: 2574 - protein, 6 aa, Artificial Sequence
  source: /note="Description of Artificial Sequence: Synthetic peptide"
GSGYPF

SEQ ID NO: 2575 - protein, 252 aa, Artificial Sequence
  source: /note="Description of Artificial Sequence: Synthetic polypeptide"
DIQMTQSPSTLSASVGDRVTITCKAQLSVGYMHWYQQKPGKAPKLLIYDTAPISSHCRLDKSNFQQPYITNRTFMLAKEASLADNNTDVRLIGEKLFHGVSMSERCYLMKQVLNFTLEEVLFPQSDRFQPYMQEVVPFLARLSNRLSTCHIEGDDLHIQRNVQKLKDTVKKLGESGEIKAIGELDLLFMSLRNACISKLASGVPSRFSGSGSGTEFTLTISSLQPDDFATYYCFQGSGYPFTFGGGTKLEIK

SEQ ID NO: 2576 - protein, 359 aa, Artificial Sequence
  source: /note="Description of Artificial Sequence: Synthetic polypeptide"
DIQMTQSPSTLSASVGDRVTITCKAQLSVGYMHWYQQKPGKAPKLLIYDTAPISSHCRLDKSNFQQPYITNRTFMLAKEASLADNNTDVRLIGEKLFHGVSMSERCYLMKQVLNFTLEEVLFPQSDRFQPYMQEVVPFLARLSNRLSTCHIEGDDLHIQRNVQKLKDTVKKLGESGEIKAIGELDLLFMSLRNACISKLASGVPSRFSGSGSGTEFTLTISSLQPDDFATYYCFQGSGYPFTFGGGTKLEIKRTVAAPSVFIFPPSDEQLKSGTASVVCLLNNFYPREAKVQWKVDNALQSGNSQESVTEQDSKDSTYSLSSTLTLSKADYEKHKVYACEVTHQGLSSPVTKSFNRGEC

SEQ ID NO: 2577 - protein, 7 aa, Artificial Sequence
  source: /note="Description of Artificial Sequence: Synthetic peptide"
TSGMSVG

SEQ ID NO: 2578 - protein, 15 aa, Artificial Sequence
  source: /note="Description of Artificial Sequence: Synthetic peptide"
DIWWDDKKDYNPSLK

SEQ ID NO: 2579 - protein, 10 aa, Artificial Sequence
  source: /note="Description of Artificial Sequence: Synthetic peptide"
SMITNWYFDV

SEQ ID NO: 2580 - protein, 9 aa, Artificial Sequence
  source: /note="Description of Artificial Sequence: Synthetic peptide"
GFSLSTSGM

SEQ ID NO: 2581 - protein, 5 aa, Artificial Sequence
  source: /note="Description of Artificial Sequence: Synthetic peptide"
WWDDK

SEQ ID NO: 2582 - protein, 10 aa, Artificial Sequence
  source: /note="Description of Artificial Sequence: Synthetic peptide"
SMITNWYFDV

SEQ ID NO: 2583 - protein, 120 aa, Artificial Sequence; identical to SEQ ID NO: 55
  source: /note="Description of Artificial Sequence: Synthetic polypeptide"

SEQ ID NO: 2584 - protein, 450 aa, Artificial Sequence; identical to SEQ ID NO: 56
  source: /note="Description of Artificial Sequence: Synthetic polypeptide"

SEQ ID NO: 2585 - protein, 10 aa, Artificial Sequence
  source: /note="Description of Artificial Sequence: Synthetic peptide"
KAQLSVGYMH

SEQ ID NO: 2586 - protein, 7 aa, Artificial Sequence
  source: /note="Description of Artificial Sequence: Synthetic peptide"
DTSKLAS

SEQ ID NO: 2587 - protein, 155 aa, Artificial Sequence
  source: /note="Description of Artificial Sequence: Synthetic polypeptide"
FQGSGAPISSHCRLDKSNFQQPYITNRTFMLAKEASLADNNTDVRLIGEKLFHGVSMSERCYLMKQVLNFTLEEVLFPQSDRFQPYMQEVVPFLARLSNRLSTCHIEGDDLHIQRNVQKLKDTVKKLGESGEIKAIGELDLLFMSLRNACIYPFT

SEQ ID NO: 2588 - protein, 6 aa, Artificial Sequence
  source: /note="Description of Artificial Sequence: Synthetic peptide"
QLSVGY

SEQ ID NO: 2589 - protein, 3 aa, Artificial Sequence
  source: /note="Description of Artificial Sequence: Synthetic peptide"
DTS

SEQ ID NO: 2590 - protein, 152 aa, Artificial Sequence
  source: /note="Description of Artificial Sequence: Synthetic polypeptide"
GSGAPISSHCRLDKSNFQQPYITNRTFMLAKEASLADNNTDVRLIGEKLFHGVSMSERCYLMKQVLNFTLEEVLFPQSDRFQPYMQEVVPFLARLSNRLSTCHIEGDDLHIQRNVQKLKDTVKKLGESGEIKAIGELDLLFMSLRNACIYPF

SEQ ID NO: 2591 - protein, 252 aa, Artificial Sequence
  source: /note="Description of Artificial Sequence: Synthetic polypeptide"
DIQMTQSPSTLSASVGDRVTITCKAQLSVGYMHWYQQKPGKAPKLLIYDTSKLASGVPSRFSGSGSGTEFTLTISSLQPDDFATYYCFQGSGAPISSHCRLDKSNFQQPYITNRTFMLAKEASLADNNTDVRLIGEKLFHGVSMSERCYLMKQVLNFTLEEVLFPQSDRFQPYMQEVVPFLARLSNRLSTCHIEGDDLHIQRNVQKLKDTVKKLGESGEIKAIGELDLLFMSLRNACIYPFTFGGGTKLEIK

SEQ ID NO: 2592 - protein, 359 aa, Artificial Sequence
  source: /note="Description of Artificial Sequence: Synthetic polypeptide"
DIQMTQSPSTLSASVGDRVTITCKAQLSVGYMHWYQQKPGKAPKLLIYDTSKLASGVPSRFSGSGSGTEFTLTISSLQPDDFATYYCFQGSGAPISSHCRLDKSNFQQPYITNRTFMLAKEASLADNNTDVRLIGEKLFHGVSMSERCYLMKQVLNFTLEEVLFPQSDRFQPYMQEVVPFLARLSNRLSTCHIEGDDLHIQRNVQKLKDTVKKLGESGEIKAIGELDLLFMSLRNACIYPFTFGGGTKLEIKRTVAAPSVFIFPPSDEQLKSGTASVVCLLNNFYPREAKVQWKVDNALQSGNSQESVTEQDSKDSTYSLSSTLTLSKADYEKHKVYACEVTHQGLSSPVTKSFNRGEC

SEQ ID NO: 2593 - protein, 173 aa, Artificial Sequence
  source: /note="Description of Artificial Sequence: Synthetic polypeptide"
DLPETHSLDNRRTLMLLAQMSRISPSSCLMDRHDFGFPQEEFDGNQFQKAPAISVLHELIQQIFNLFTTKDSSAAWDEDLLDKFCTELYQQLNDLEACVMQEERVGETPLMNADSILAVKKYFRRITLYLTEKKYSPCAWEVVRAEIMRSLSLSTNLQERLRRKESTSGMSVG

SEQ ID NO: 2594 - protein, 16 aa, Artificial Sequence
  source: /note="Description of Artificial Sequence: Synthetic peptide"
DIWWDDKKDYNPSLKS

SEQ ID NO: 2595 - protein, 10 aa, Artificial Sequence
  source: /note="Description of Artificial Sequence: Synthetic peptide"
SMITNWYFDV

SEQ ID NO: 2596 - protein, 175 aa, Artificial Sequence
  source: /note="Description of Artificial Sequence: Synthetic polypeptide"
GFSLCDLPETHSLDNRRTLMLLAQMSRISPSSCLMDRHDFGFPQEEFDGNQFQKAPAISVLHELIQQIFNLFTTKDSSAAWDEDLLDKFCTELYQQLNDLEACVMQEERVGETPLMNADSILAVKKYFRRITLYLTEKKYSPCAWEVVRAEIMRSLSLSTNLQERLRRKESTSGM

SEQ ID NO: 2597 - protein, 5 aa, Artificial Sequence
  source: /note="Description of Artificial Sequence: Synthetic peptide"
WWDDK

SEQ ID NO: 2598 - protein, 10 aa, Artificial Sequence
  source: /note="Description of Artificial Sequence: Synthetic peptide"
SMITNWYFDV

SEQ ID NO: 2599 - protein, 286 aa, Artificial Sequence
  source: /note="Description of Artificial Sequence: Synthetic polypeptide"
QVTLRESGPALVKPTQTLTLTCTFSGFSLCDLPETHSLDNRRTLMLLAQMSRISPSSCLMDRHDFGFPQEEFDGNQFQKAPAISVLHELIQQIFNLFTTKDSSAAWDEDLLDKFCTELYQQLNDLEACVMQEERVGETPLMNADSILAVKKYFRRITLYLTEKKYSPCAWEVVRAEIMRSLSLSTNLQERLRRKESTSGMSVGWIRQPPGKALEWLADIWWDDKKDYNPSLKSRLTISKDTSKNQVVLKVTNMDPADTATYYCARSMITNWYFDVWGAGTTVTVSS

SEQ ID NO: 2600 - protein, 616 aa, Artificial Sequence
  source: /note="Description of Artificial Sequence: Synthetic polypeptide"
QVTLRESGPALVKPTQTLTLTCTFSGFSLCDLPETHSLDNRRTLMLLAQMSRISPSSCLMDRHDFGFPQEEFDGNQFQKAPAISVLHELIQQIFNLFTTKDSSAAWDEDLLDKFCTELYQQLNDLEACVMQEERVGETPLMNADSILAVKKYFRRITLYLTEKKYSPCAWEVVRAEIMRSLSLSTNLQERLRRKESTSGMSVGWIRQPPGKALEWLADIWWDDKKDYNPSLKSRLTISKDTSKNQVVLKVTNMDPADTATYYCARSMITNWYFDVWGAGTTVTVSSASTKGPSVFPLAPSSKSTSGGTAALGCLVKDYFPEPVTVSWNSGALTSGVHTFPAVLQSSGLYSLSSVVTVPSSSLGTQTYICNVNHKPSNTKVDKRVEPKSCDKTHTCPPCPAPELLGGPSVFLFPPKPKDTLMISRTPEVTCVVVAVSHEDPEVKFNWYVDGVEVHNAKTKPREEQYNSTYRVVSVLTVLHQDWLNGKEYKCKVSNKALAAPIEKTISKAKGQPREPQVYTLPPSREEMTKNQVSLTCLVKGFYPSDIAVEWESNGQPENNYKTTPPVLDSDGSFFLYSKLTVDKSRWQQGNVFSCSVMHEALHNHYTQKSLSLSPGK

SEQ ID NO: 2601 - protein, 10 aa, Artificial Sequence
  source: /note="Description of Artificial Sequence: Synthetic peptide"
KAQLSVGYMH

SEQ ID NO: 2602 - protein, 7 aa, Artificial Sequence
  source: /note="Description of Artificial Sequence: Synthetic peptide"
DTSKLAS

SEQ ID NO: 2603 - protein, 9 aa, Artificial Sequence
  source: /note="Description of Artificial Sequence: Synthetic peptide"
FQGSGYPFT

SEQ ID NO: 2604 - protein, 6 aa, Artificial Sequence
  source: /note="Description of Artificial Sequence: Synthetic peptide"
QLSVGY

SEQ ID NO: 2605 - protein, 3 aa, Artificial Sequence
  source: /note="Description of Artificial Sequence: Synthetic peptide"
DTS

SEQ ID NO: 2606 - protein, 6 aa, Artificial Sequence
  source: /note="Description of Artificial Sequence: Synthetic peptide"
GSGYPF

SEQ ID NO: 2607 - protein, 106 aa, Artificial Sequence; identical to SEQ ID NO: 15
  source: /note="Description of Artificial Sequence: Synthetic polypeptide"

SEQ ID NO: 2608 - protein, 213 aa, Artificial Sequence; identical to SEQ ID NO: 16
  source: /note="Description of Artificial Sequence: Synthetic polypeptide"

SEQ ID NO: 2609 - protein, 7 aa, Artificial Sequence
  source: /note="Description of Artificial Sequence: Synthetic peptide"
TSGMSVG

SEQ ID NO: 2610 - protein, 182 aa, Artificial Sequence
  source: /note="Description of Artificial Sequence: Synthetic polypeptide"
DIWWDCDLPETHSLDNRRTLMLLAQMSRISPSSCLMDRHDFGFPQEEFDGNQFQKAPAISVLHELIQQIFNLFTTKDSSAAWDEDLLDKFCTELYQQLNDLEACVMQEERVGETPLMNADSILAVKKYFRRITLYLTEKKYSPCAWEVVRAEIMRSLSLSTNLQERLRRKEDKKDYNPSLKS

SEQ ID NO: 2611 - protein, 10 aa, Artificial Sequence
  source: /note="Description of Artificial Sequence: Synthetic peptide"
SMITNWYFDV

SEQ ID NO: 2612 - protein, 9 aa, Artificial Sequence
  source: /note="Description of Artificial Sequence: Synthetic peptide"
GFSLSTSGM

SEQ ID NO: 2613 - protein, 171 aa, Artificial Sequence
  source: /note="Description of Artificial Sequence: Synthetic polypeptide"
WWDCDLPETHSLDNRRTLMLLAQMSRISPSSCLMDRHDFGFPQEEFDGNQFQKAPAISVLHELIQQIFNLFTTKDSSAAWDEDLLDKFCTELYQQLNDLEACVMQEERVGETPLMNADSILAVKKYFRRITLYLTEKKYSPCAWEVVRAEIMRSLSLSTNLQERLRRKEDK

SEQ ID NO: 2614 - protein, 10 aa, Artificial Sequence
  source: /note="Description of Artificial Sequence: Synthetic peptide"
SMITNWYFDV

SEQ ID NO: 2615 - protein, 286 aa, Artificial Sequence
  source: /note="Description of Artificial Sequence: Synthetic polypeptide"
QVTLRESGPALVKPTQTLTLTCTFSGFSLSTSGMSVGWIRQPPGKALEWLADIWWDCDLPETHSLDNRRTLMLLAQMSRISPSSCLMDRHDFGFPQEEFDGNQFQKAPAISVLHELIQQIFNLFTTKDSSAAWDEDLLDKFCTELYQQLNDLEACVMQEERVGETPLMNADSILAVKKYFRRITLYLTEKKYSPCAWEVVRAEIMRSLSLSTNLQERLRRKEDKKDYNPSLKSRLTISKDTSKNQVVLKVTNMDPADTATYYCARSMITNWYFDVWGAGTTVTVSS

SEQ ID NO: 2616 - protein, 616 aa, Artificial Sequence
  source: /note="Description of Artificial Sequence: Synthetic polypeptide"
QVTLRESGPALVKPTQTLTLTCTFSGFSLSTSGMSVGWIRQPPGKALEWLADIWWDCDLPETHSLDNRRTLMLLAQMSRISPSSCLMDRHDFGFPQEEFDGNQFQKAPAISVLHELIQQIFNLFTTKDSSAAWDEDLLDKFCTELYQQLNDLEACVMQEERVGETPLMNADSILAVKKYFRRITLYLTEKKYSPCAWEVVRAEIMRSLSLSTNLQERLRRKEDKKDYNPSLKSRLTISKDTSKNQVVLKVTNMDPADTATYYCARSMITNWYFDVWGAGTTVTVSSASTKGPSVFPLAPSSKSTSGGTAALGCLVKDYFPEPVTVSWNSGALTSGVHTFPAVLQSSGLYSLSSVVTVPSSSLGTQTYICNVNHKPSNTKVDKRVEPKSCDKTHTCPPCPAPELLGGPSVFLFPPKPKDTLMISRTPEVTCVVVAVSHEDPEVKFNWYVDGVEVHNAKTKPREEQYNSTYRVVSVLTVLHQDWLNGKEYKCKVSNKALAAPIEKTISKAKGQPREPQVYTLPPSREEMTKNQVSLTCLVKGFYPSDIAVEWESNGQPENNYKTTPPVLDSDGSFFLYSKLTVDKSRWQQGNVFSCSVMHEALHNHYTQKSLSLSPGK

SEQ ID NO: 2617 - protein, 10 aa, Artificial Sequence
  source: /note="Description of Artificial Sequence: Synthetic peptide"
KAQLSVGYMH

SEQ ID NO: 2618 - protein, 7 aa, Artificial Sequence
  source: /note="Description of Artificial Sequence: Synthetic peptide"
DTSKLAS

SEQ ID NO: 2619 - protein, 9 aa, Artificial Sequence
  source: /note="Description of Artificial Sequence: Synthetic peptide"
FQGSGYPFT

SEQ ID NO: 2620 - protein, 6 aa, Artificial Sequence
  source: /note="Description of Artificial Sequence: Synthetic peptide"
QLSVGY

SEQ ID NO: 2621 - protein, 3 aa, Artificial Sequence
  source: /note="Description of Artificial Sequence: Synthetic peptide"
DTS

SEQ ID NO: 2622 - protein, 6 aa, Artificial Sequence
  source: /note="Description of Artificial Sequence: Synthetic peptide"
GSGYPF

SEQ ID NO: 2623 - protein, 106 aa, Artificial Sequence; identical to SEQ ID NO: 15
  source: /note="Description of Artificial Sequence: Synthetic polypeptide"

SEQ ID NO: 2624 - protein, 213 aa, Artificial Sequence; identical to SEQ ID NO: 16
  source: /note="Description of Artificial Sequence: Synthetic polypeptide"

SEQ ID NO: 2625 - protein, 7 aa, Artificial Sequence
  source: /note="Description of Artificial Sequence: Synthetic peptide"
TSGMSVG

SEQ ID NO: 2626 - protein, 16 aa, Artificial Sequence
  source: /note="Description of Artificial Sequence: Synthetic peptide"
DIWWDDKKDYNPSLKS

SEQ ID NO: 2627 - protein, 176 aa, Artificial Sequence
  source: /note="Description of Artificial Sequence: Synthetic polypeptide"
SMITCDLPETHSLDNRRTLMLLAQMSRISPSSCLMDRHDFGFPQEEFDGNQFQKAPAISVLHELIQQIFNLFTTKDSSAAWDEDLLDKFCTELYQQLNDLEACVMQEERVGETPLMNADSILAVKKYFRRITLYLTEKKYSPCAWEVVRAEIMRSLSLSTNLQERLRRKENWYFDV

SEQ ID NO: 2628 - protein, 9 aa, Artificial Sequence
  source: /note="Description of Artificial Sequence: Synthetic peptide"
GFSLSTSGM

SEQ ID NO: 2629 - protein, 5 aa, Artificial Sequence
  source: /note="Description of Artificial Sequence: Synthetic peptide"
WWDDK

SEQ ID NO: 2630 - protein, 176 aa, Artificial Sequence; identical to SEQ ID NO: 2627
  source: /note="Description of Artificial Sequence: Synthetic polypeptide"

SEQ ID NO: 2631 - protein, 286 aa, Artificial Sequence
  source: /note="Description of Artificial Sequence: Synthetic polypeptide"
QVTLRESGPALVKPTQTLTLTCTFSGFSLSTSGMSVGWIRQPPGKALEWLADIWWDDKKDYNPSLKSRLTISKDTSANQVVLKVTNMDPADTATYYCARSMITCDLPETHSLDNRRTLMLLAQMSRISPSSCLMDRHDFGFPQEEFDGNQFQKAPAISVLHELIQQIFNLFTTKDSSAAWDEDLLDKFCTELYQQLNDLEACVMQEERVGETPLMNADSILAVKKYFRRITLYLTEKKYSPCAWEVVRAEIMRSLSLSTNLQERLRRKENWYFDVWGAGTTVTVSS

SEQ ID NO: 2632 - protein, 616 aa, Artificial Sequence
  source: /note="Description of Artificial Sequence: Synthetic polypeptide"
QVTLRESGPALVKPTQTLTLTCTFSGFSLSTSGMSVGWIRQPPGKALEWLADIWWDDKKDYNPSLKSRLTISKDTSANQVVLKVTNMDPADTATYYCARSMITCDLPETHSLDNRRTLMLLAQMSRISPSSCLMDRHDFGFPQEEFDGNQFQKAPAISVLHELIQQIFNLFTTKDSSAAWDEDLLDKFCTELYQQLNDLEACVMQEERVGETPLMNADSILAVKKYFRRITLYLTEKKYSPCAWEVVRAEIMRSLSLSTNLQERLRRKENWYFDVWGAGTTVTVSSASTKGPSVFPLAPSSKSTSGGTAALGCLVKDYFPEPVTVSWNSGALTSGVHTFPAVLQSSGLYSLSSVVTVPSSSLGTQTYICNVNHKPSNTKVDKRVEPKSCDKTHTCPPCPAPELLGGPSVFLFPPKPKDTLMISRTPEVTCVVVAVSHEDPEVKFNWYVDGVEVHNAKTKPREEQYNSTYRVVSVLTVLHQDWLNGKEYKCKVSNKALAAPIEKTISKAKGQPREPQVYTLPPSREEMTKNQVSLTCLVKGFYPSDIAVEWESNGQPENNYKTTPPVLDSDGSFFLYSKLTVDKSRWQQGNVFSCSVMHEALHNHYTQKSLSLSPGK

SEQ ID NO: 2633 - protein, 10 aa, Artificial Sequence
  source: /note="Description of Artificial Sequence: Synthetic peptide"
KAQLSVGYMH

SEQ ID NO: 2634 - protein, 7 aa, Artificial Sequence
  source: /note="Description of Artificial Sequence: Synthetic peptide"
DTSKLAS

SEQ ID NO: 2635 - protein, 9 aa, Artificial Sequence
  source: /note="Description of Artificial Sequence: Synthetic peptide"
FQGSGYPFT

SEQ ID NO: 2636 - protein, 6 aa, Artificial Sequence
  source: /note="Description of Artificial Sequence: Synthetic peptide"
QLSVGY

SEQ ID NO: 2637 - protein, 3 aa, Artificial Sequence
  source: /note="Description of Artificial Sequence: Synthetic peptide"
DTS

SEQ ID NO: 2638 - protein, 6 aa, Artificial Sequence
  source: /note="Description of Artificial Sequence: Synthetic peptide"
GSGYPF

SEQ ID NO: 2639 - protein, 106 aa, Artificial Sequence; identical to SEQ ID NO: 15
  source: /note="Description of Artificial Sequence: Synthetic polypeptide"

SEQ ID NO: 2640 - protein, 213 aa, Artificial Sequence; identical to SEQ ID NO: 16
  source: /note="Description of Artificial Sequence: Synthetic polypeptide"

SEQ ID NO: 2641 - protein, 7 aa, Artificial Sequence
  source: /note="Description of Artificial Sequence: Synthetic peptide"
TSGMSVG

SEQ ID NO: 2642 - protein, 15 aa, Artificial Sequence
  source: /note="Description of Artificial Sequence: Synthetic peptide"
DIWWDDKKDYNPSLK

SEQ ID NO: 2643 - protein, 10 aa, Artificial Sequence
  source: /note="Description of Artificial Sequence: Synthetic peptide"
SMITNWYFDV

SEQ ID NO: 2644 - protein, 9 aa, Artificial Sequence
  source: /note="Description of Artificial Sequence: Synthetic peptide"
GFSLSTSGM

SEQ ID NO: 2645 - protein, 5 aa, Artificial Sequence
  source: /note="Description of Artificial Sequence: Synthetic peptide"
WWDDK

SEQ ID NO: 2646 - protein, 10 aa, Artificial Sequence
  source: /note="Description of Artificial Sequence: Synthetic peptide"
SMITNWYFDV

SEQ ID NO: 2647 - protein, 120 aa, Artificial Sequence; identical to SEQ ID NO: 55
  source: /note="Description of Artificial Sequence: Synthetic polypeptide"

SEQ ID NO: 2648 - protein, 450 aa, Artificial Sequence; identical to SEQ ID NO: 56
  source: /note="Description of Artificial Sequence: Synthetic polypeptide"

SEQ ID NO: 2649 - protein, 176 aa, Artificial Sequence
  source: /note="Description of Artificial Sequence: Synthetic polypeptide"
KAQLSCDLPETHSLDNRRTLMLLAQMSRISPSSCLMDRHDFGFPQEEFDGNQFQKAPAISVLHELIQQIFNLFTTKDSSAAWDEDLLDKFCTELYQQLNDLEACVMQEERVGETPLMNADSILAVKKYFRRITLYLTEKKYSPCAWEVVRAEIMRSLSLSTNLQERLRRKEVGYMH

SEQ ID NO: 2650 - protein, 7 aa, Artificial Sequence
  source: /note="Description of Artificial Sequence: Synthetic peptide"
DTSKLAS

SEQ ID NO: 2651 - protein, 9 aa, Artificial Sequence
  source: /note="Description of Artificial Sequence: Synthetic peptide"
FQGSGYPFT

SEQ ID NO: 2652 - protein, 172 aa, Artificial Sequence
  source: /note="Description of Artificial Sequence: Synthetic polypeptide"
QLSCDLPETHSLDNRRTLMLLAQMSRISPSSCLMDRHDFGFPQEEFDGNQFQKAPAISVLHELIQQIFNLFTTKDSSAAWDEDLLDKFCTELYQQLNDLEACVMQEERVGETPLMNADSILAVKKYFRRITLYLTEKKYSPCAWEVVRAEIMRSLSLSTNLQERLRRKEVGY

SEQ ID NO: 2653 - protein, 3 aa, Artificial Sequence
  source: /note="Description of Artificial Sequence: Synthetic peptide"
DTS

SEQ ID NO: 2654 - protein, 6 aa, Artificial Sequence
  source: /note="Description of Artificial Sequence: Synthetic peptide"
GSGYPF

SEQ ID NO: 2655 - protein, 272 aa, Artificial Sequence
  source: /note="Description of Artificial Sequence: Synthetic polypeptide"
DIQMTQSPSTLSASVGDRVTITCKAQLSCDLPETHSLDNRRTLMLLAQMSRISPSSCLMDRHDFGFPQEEFDGNQFQKAPAISVLHELIQQIFNLFTTKDSSAAWDEDLLDKFCTELYQQLNDLEACVMQEERVGETPLMNADSILAVKKYFRRITLYLTEKKYSPCAWEVVRAEIMRSLSLSTNLQERLRRKEVGYMHWYQQKPGKAPKLLIYDTSKLASGVPSRFSGSGSGTEFTLTISSLQPDDFATYYCFQGSGYPFTFGGGTKLEIK

SEQ ID NO: 2656 - protein, 379 aa, Artificial Sequence
  source: /note="Description of Artificial Sequence: Synthetic polypeptide"
DIQMTQSPSTLSASVGDRVTITCKAQLSCDLPETHSLDNRRTLMLLAQMSRISPSSCLMDRHDFGFPQEEFDGNQFQKAPAISVLHELIQQIFNLFTTKDSSAAWDEDLLDKFCTELYQQLNDLEACVMQEERVGETPLMNADSILAVKKYFRRITLYLTEKKYSPCAWEVVRAEIMRSLSLSTNLQERLRRKEVGYMHWYQQKPGKAPKLLIYDTSKLASGVPSRFSGSGSGTEFTLTISSLQPDDFATYYCFQGSGYPFTFGGGTKLEIKRTVAAPSVFIFPPSDEQLKSGTASVVCLLNNFYPREAKVQWKVDNALQSGNSQESVTEQDSKDSTYSLSSTLTLSKADYEKHKVYACEVTHQGLSSPVTKSFNRGEC

SEQ ID NO: 2657 - protein, 7 aa, Artificial Sequence
  source: /note="Description of Artificial Sequence: Synthetic peptide"
TSGMSVG

SEQ ID NO: 2658 - protein, 15 aa, Artificial Sequence
  source: /note="Description of Artificial Sequence: Synthetic peptide"
DIWWDDKKDYNPSLK

SEQ ID NO: 2659 - protein, 10 aa, Artificial Sequence
  source: /note="Description of Artificial Sequence: Synthetic peptide"
SMITNWYFDV

SEQ ID NO: 2660 - protein, 9 aa, Artificial Sequence
  source: /note="Description of Artificial Sequence: Synthetic peptide"
GFSLSTSGM

SEQ ID NO: 2661 - protein, 5 aa, Artificial Sequence
  source: /note="Description of Artificial Sequence: Synthetic peptide"
WWDDK

SEQ ID NO: 2662 - protein, 10 aa, Artificial Sequence
  source: /note="Description of Artificial Sequence: Synthetic peptide"
SMITNWYFDV

SEQ ID NO: 2663 - protein, 120 aa, Artificial Sequence; identical to SEQ ID NO: 55
  source: /note="Description of Artificial Sequence: Synthetic polypeptide"

SEQ ID NO: 2664 - protein, 450 aa, Artificial Sequence; identical to SEQ ID NO: 56
  source: /note="Description of Artificial Sequence: Synthetic polypeptide"

SEQ ID NO: 2665 - protein, 10 aa, Artificial Sequence
  source: /note="Description of Artificial Sequence: Synthetic peptide"
KAQLSVGYMH

SEQ ID NO: 2666 - protein, 173 aa, Artificial Sequence
  source: /note="Description of Artificial Sequence: Synthetic polypeptide"
DTCDLPETHSLDNRRTLMLLAQMSRISPSSCLMDRHDFGFPQEEFDGNQFQKAPAISVLHELIQQIFNLFTTKDSSAAWDEDLLDKFCTELYQQLNDLEACVMQEERVGETPLMNADSILAVKKYFRRITLYLTEKKYSPCAWEVVRAEIMRSLSLSTNLQERLRRKESKLAS

SEQ ID NO: 2667 - protein, 9 aa, Artificial Sequence
  source: /note="Description of Artificial Sequence: Synthetic peptide"
FQGSGYPFT

SEQ ID NO: 2668 - protein, 6 aa, Artificial Sequence
  source: /note="Description of Artificial Sequence: Synthetic peptide"
QLSVGY

SEQ ID NO: 2669 - protein, 169 aa, Artificial Sequence
  source: /note="Description of Artificial Sequence: Synthetic polypeptide"
DTCDLPETHSLDNRRTLMLLAQMSRISPSSCLMDRHDFGFPQEEFDGNQFQKAPAISVLHELIQQIFNLFTTKDSSAAWDEDLLDKFCTELYQQLNDLEACVMQEERVGETPLMNADSILAVKKYFRRITLYLTEKKYSPCAWEVVRAEIMRSLSLSTNLQERLRRKES

SEQ ID NO: 2670 - protein, 6 aa, Artificial Sequence
  source: /note="Description of Artificial Sequence: Synthetic peptide"
GSGYPF

SEQ ID NO: 2671 - protein, 272 aa, Artificial Sequence
  source: /note="Description of Artificial Sequence: Synthetic polypeptide"
DIQMTQSPSTLSASVGDRVTITCKAQLSVGYMHWYQQKPGKAPKLLIYDTCDLPETHSLDNRRTLMLLAQMSRISPSSCLMDRHDFGFPQEEFDGNQFQKAPAISVLHELIQQIFNLFTTKDSSAAWDEDLLDKFCTELYQQLNDLEACVMQEERVGETPLMNADSILAVKKYFRRITLYLTEKKYSPCAWEVVRAEIMRSLSLSTNLQERLRRKESKLASGVPSRFSGSGSGTEFTLTISSLQPDDFATYYCFQGSGYPFTFGGGTKLEIK

SEQ ID NO: 2672 - protein, 379 aa, Artificial Sequence
  source: /note="Description of Artificial Sequence: Synthetic polypeptide"
DIQMTQSPSTLSASVGDRVTITCKAQLSVGYMHWYQQKPGKAPKLLIYDTCDLPETHSLDNRRTLMLLAQMSRISPSSCLMDRHDFGFPQEEFDGNQFQKAPAISVLHELIQQIFNLFTTKDSSAAWDEDLLDKFCTELYQQLNDLEACVMQEERVGETPLMNADSILAVKKYFRRITLYLTEKKYSPCAWEVVRAEIMRSLSLSTNLQERLRRKESKLASGVPSRFSGSGSGTEFTLTISSLQPDDFATYYCFQGSGYPFTFGGGTKLEIKRTVAAPSVFIFPPSDEQLKSGTASVVCLLNNFYPREAKVQWKVDNALQSGNSQESVTEQDSKDSTYSLSSTLTLSKADYEKHKVYACEVTHQGLSSPVTKSFNRGEC

SEQ ID NO: 2673 - protein, 7 aa, Artificial Sequence
  source: /note="Description of Artificial Sequence: Synthetic peptide"
TSGMSVG

SEQ ID NO: 2674 - protein, 15 aa, Artificial Sequence
  source: /note="Description of Artificial Sequence: Synthetic peptide"
DIWWDDKKDYNPSLK

SEQ ID NO: 2675 - protein, 10 aa, Artificial Sequence
  source: /note="Description of Artificial Sequence: Synthetic peptide"
SMITNWYFDV

SEQ ID NO: 2676 - protein, 9 aa, Artificial Sequence
  source: /note="Description of Artificial Sequence: Synthetic peptide"
GFSLSTSGM

SEQ ID NO: 2677 - protein, 5 aa, Artificial Sequence
  source: /note="Description of Artificial Sequence: Synthetic peptide"
WWDDK

SEQ ID NO: 2678 - protein, 10 aa, Artificial Sequence
  source: /note="Description of Artificial Sequence: Synthetic peptide"
SMITNWYFDV

SEQ ID NO: 2679 - protein, 120 aa, Artificial Sequence; identical to SEQ ID NO: 55
  source: /note="Description of Artificial Sequence: Synthetic polypeptide"

SEQ ID NO: 2680 - protein, 450 aa, Artificial Sequence; identical to SEQ ID NO: 56
  source: /note="Description of Artificial Sequence: Synthetic polypeptide"

SEQ ID NO: 2681 - protein, 10 aa, Artificial Sequence
  source: /note="Description of Artificial Sequence: Synthetic peptide"
KAQLSVGYMH

SEQ ID NO: 2682 - protein, 7 aa, Artificial Sequence
  source: /note="Description of Artificial Sequence: Synthetic peptide"
DTSKLAS

SEQ ID NO: 2683 - protein, 175 aa, Artificial Sequence
  source: /note="Description of Artificial Sequence: Synthetic polypeptide"
FQGSGCDLPETHSLDNRRTLMLLAQMSRISPSSCLMDRHDFGFPQEEFDGNQFQKAPAISVLHELIQQIFNLFTTKDSSAAWDEDLLDKFCTELYQQLNDLEACVMQEERVGETPLMNADSILAVKKYFRRITLYLTEKKYSPCAWEVVRAEIMRSLSLSTNLQERLRRKEYPFT

SEQ ID NO: 2684 - protein, 6 aa, Artificial Sequence
  source: /note="Description of Artificial Sequence: Synthetic peptide"
QLSVGY

SEQ ID NO: 2685 - protein, 3 aa, Artificial Sequence
  source: /note="Description of Artificial Sequence: Synthetic peptide"
DTS

SEQ ID NO: 2686 - protein, 172 aa, Artificial Sequence
  source: /note="Description of Artificial Sequence: Synthetic polypeptide"
GSGCDLPETHSLDNRRTLMLLAQMSRISPSSCLMDRHDFGFPQEEFDGNQFQKAPAISVLHELIQQIFNLFTTKDSSAAWDEDLLDKFCTELYQQLNDLEACVMQEERVGETPLMNADSILAVKKYFRRITLYLTEKKYSPCAWEVVRAEIMRSLSLSTNLQERLRRKEYPF

SEQ ID NO: 2687 - protein, 272 aa, Artificial Sequence
  source: /note="Description of Artificial Sequence: Synthetic polypeptide"
DIQMTQSPSTLSASVGDRVTITCKAQLSVGYMHWYQQKPGKAPKLLIYDTSKLASGVPSRFSGSGSGTEFTLTISSLQPDDFATYYCFQGSGCDLPETHSLDNRRTLMLLAQMSRISPSSCLMDRHDFGFPQEEFDGNQFQKAPAISVLHELIQQIFNLFTTKDSSAAWDEDLLDKFCTELYQQLNDLEACVMQEERVGETPLMNADSILAVKKYFRRITLYLTEKKYSPCAWEVVRAEIMRSLSLSTNLQERLRRKEYPFTFGGGTKLEIK

SEQ ID NO: 2688 - protein, 379 aa, Artificial Sequence
  source: /note="Description of Artificial Sequence: Synthetic polypeptide"
DIQMTQSPSTLSASVGDRVTITCKAQLSVGYMHWYQQKPGKAPKLLIYDTSKLASGVPSRFSGSGSGTEFTLTISSLQPDDFATYYCFQGSGCDLPETHSLDNRRTLMLLAQMSRISPSSCLMDRHDFGFPQEEFDGNQFQKAPAISVLHELIQQIFNLFTTKDSSAAWDEDLLDKFCTELYQQLNDLEACVMQEERVGETPLMNADSILAVKKYFRRITLYLTEKKYSPCAWEVVRAEIMRSLSLSTNLQERLRRKEYPFTFGGGTKLEIKRTVAAPSVFIFPPSDEQLKSGTASVVCLLNNFYPREAKVQWKVDNALQSGNSQESVTEQDSKDSTYSLSSTLTLSKADYEKHKVYACEVTHQGLSSPVTKSFNRGEC

SEQ ID NO: 2689 - protein, 173 aa, Artificial Sequence
  source: /note="Description of Artificial Sequence: Synthetic polypeptide"
SYNLLGFLQRSSNFQCQKLLWQLNGRLEYCLKDRMNFDIPEEIKQLQQFQKEDAALTIYEMLQNIFAIFRQDSSSTGWNETIVENLLANVYHQINHLKTVLEEKLEKEDFTRGKLMSSLHLKRYYGRILHYLKAKEYSHCAWTIVRVEILRNFYFINRLTGYLRNSTSGMSVG

SEQ ID NO: 2690 - protein, 16 aa, Artificial Sequence
  source: /note="Description of Artificial Sequence: Synthetic peptide"
DIWWDDKKDYNPSLKS

SEQ ID NO: 2691 - protein, 10 aa, Artificial Sequence
  source: /note="Description of Artificial Sequence: Synthetic peptide"
SMITNWYFDV

SEQ ID NO: 2692 - protein, 175 aa, Artificial Sequence
  source: /note="Description of Artificial Sequence: Synthetic polypeptide"
GFSLMSYNLLGFLQRSSNFQCQKLLWQLNGRLEYCLKDRMNFDIPEEIKQLQQFQKEDAALTIYEMLQNIFAIFRQDSSSTGWNETIVENLLANVYHQINHLKTVLEEKLEKEDFTRGKLMSSLHLKRYYGRILHYLKAKEYSHCAWTIVRVEILRNFYFINRLTGYLRNSTSGM

SEQ ID NO: 2693 - protein, 5 aa, Artificial Sequence
  source: /note="Description of Artificial Sequence: Synthetic peptide"
WWDDK

SEQ ID NO: 2694 - protein, 10 aa, Artificial Sequence
  source: /note="Description of Artificial Sequence: Synthetic peptide"
SMITNWYFDV

SEQ ID NO: 2695 - protein, 286 aa, Artificial Sequence
  source: /note="Description of Artificial Sequence: Synthetic polypeptide"
QVTLRESGPALVKPTQTLTLTCTFSGFSLMSYNLLGFLQRSSNFQCQKLLWQLNGRLEYCLKDRMNFDIPEEIKQLQQFQKEDAALTIYEMLQNIFAIFRQDSSSTGWNETIVENLLANVYHQINHLKTVLEEKLEKEDFTRGKLMSSLHLKRYYGRILHYLKAKEYSHCAWTIVRVEILRNFYFINRLTGYLRNSTSGMSVGWIRQPPGKALEWLADIWWDDKKDYNPSLKSRLTISKDTSKNQVVLKVTNMDPADTATYYCARSMITNWYFDVWGAGTTVTVSS

SEQ ID NO: 2696 - protein, 616 aa, Artificial Sequence
  source: /note="Description of Artificial Sequence: Synthetic polypeptide"
QVTLRESGPALVKPTQTLTLTCTFSGFSLMSYNLLGFLQRSSNFQCQKLLWQLNGRLEYCLKDRMNFDIPEEIKQLQQFQKEDAALTIYEMLQNIFAIFRQDSSSTGWNETIVENLLANVYHQINHLKTVLEEKLEKEDFTRGKLMSSLHLKRYYGRILHYLKAKEYSHCAWTIVRVEILRNFYFINRLTGYLRNSTSGMSVGWIRQPPGKALEWLADIWWDDKKDYNPSLKSRLTISKDTSKNQVVLKVTNMDPADTATYYCARSMITNWYFDVWGAGTTVTVSSASTKGPSVFPLAPSSKSTSGGTAALGCLVKDYFPEPVTVSWNSGALTSGVHTFPAVLQSSGLYSLSSVVTVPSSSLGTQTYICNVNHKPSNTKVDKRVEPKSCDKTHTCPPCPAPELLGGPSVFLFPPKPKDTLMISRTPEVTCVVVAVSHEDPEVKFNWYVDGVEVHNAKTKPREEQYNSTYRVVSVLTVLHQDWLNGKEYKCKVSNKALAAPIEKTISKAKGQPREPQVYTLPPSREEMTKNQVSLTCLVKGFYPSDIAVEWESNGQPENNYKTTPPVLDSDGSFFLYSKLTVDKSRWQQGNVFSCSVMHEALHNHYTQKSLSLSPGK

SEQ ID NO: 2697 - protein, 10 aa, Artificial Sequence
  source: /note="Description of Artificial Sequence: Synthetic peptide"
KAQLSVGYMH

SEQ ID NO: 2698 - protein, 7 aa, Artificial Sequence
  source: /note="Description of Artificial Sequence: Synthetic peptide"
DTSKLAS

SEQ ID NO: 2699 - protein, 9 aa, Artificial Sequence
  source: /note="Description of Artificial Sequence: Synthetic peptide"
FQGSGYPFT

SEQ ID NO: 2700 - protein, 6 aa, Artificial Sequence
  source: /note="Description of Artificial Sequence: Synthetic peptide"
QLSVGY

SEQ ID NO: 2701 - protein, 3 aa, Artificial Sequence
  source: /note="Description of Artificial Sequence: Synthetic peptide"
DTS

SEQ ID NO: 2702 - protein, 6 aa, Artificial Sequence
  source: /note="Description of Artificial Sequence: Synthetic peptide"
GSGYPF

SEQ ID NO: 2703 - protein, 106 aa, Artificial Sequence; identical to SEQ ID NO: 15
  source: /note="Description of Artificial Sequence: Synthetic polypeptide"

SEQ ID NO: 2704 - protein, 213 aa, Artificial Sequence; identical to SEQ ID NO: 16
  source: /note="Description of Artificial Sequence: Synthetic polypeptide"

SEQ ID NO: 2705 - protein, 7 aa, Artificial Sequence
  source: /note="Description of Artificial Sequence: Synthetic peptide"
TSGMSVG

SEQ ID NO: 2706 - protein, 182 aa, Artificial Sequence
  source: /note="Description of Artificial Sequence: Synthetic polypeptide"
DIWWDMSYNLLGFLQRSSNFQCQKLLWQLNGRLEYCLKDRMNFDIPEEIKQLQQFQKEDAALTIYEMLQNIFAIFRQDSSSTGWNETIVENLLANVYHQINHLKTVLEEKLEKEDFTRGKLMSSLHLKRYYGRILHYLKAKEYSHCAWTIVRVEILRNFYFINRLTGYLRNDKKDYNPSLKS

SEQ ID NO: 2707 - protein, 10 aa, Artificial Sequence
  source: /note="Description of Artificial Sequence: Synthetic peptide"
SMITNWYFDV

SEQ ID NO: 2708 - protein, 9 aa, Artificial Sequence
  source: /note="Description of Artificial Sequence: Synthetic peptide"
GFSLSTSGM

SEQ ID NO: 2709 - protein, 171 aa, Artificial Sequence
  source: /note="Description of Artificial Sequence: Synthetic polypeptide"
WWDMSYNLLGFLQRSSNFQCQKLLWQLNGRLEYCLKDRMNFDIPEEIKQLQQFQKEDAALTIYEMLQNIFAIFRQDSSSTGWNETIVENLLANVYHQINHLKTVLEEKLEKEDFTRGKLMSSLHLKRYYGRILHYLKAKEYSHCAWTIVRVEILRNFYFINRLTGYLRNDK

SEQ ID NO: 2710 - protein, 10 aa, Artificial Sequence
  source: /note="Description of Artificial Sequence: Synthetic peptide"
SMITNWYFDV

SEQ ID NO: 2711 - protein, 286 aa, Artificial Sequence
  source: /note="Description of Artificial Sequence: Synthetic polypeptide"
QVTLRESGPALVKPTQTLTLTCTFSGFSLSTSGMSVGWIRQPPGKALEWLADIWWDMSYNLLGFLQRSSNFQCQKLLWQLNGRLEYCLKDRMNFDIPEEIKQLQQFQKEDAALTIYEMLQNIFAIFRQDSSSTGWNETIVENLLANVYHQINHLKTVLEEKLEKEDFTRGKLMSSLHLKRYYGRILHYLKAKEYSHCAWTIVRVEILRNFYFINRLTGYLRNDKKDYNPSLKSRLTISKDTSKNQVVLKVTNMDPADTATYYCARSMITNWYFDVWGAGTTVTVSS

SEQ ID NO: 2712 - protein, 616 aa, Artificial Sequence
  source: /note="Description of Artificial Sequence: Synthetic polypeptide"
QVTLRESGPALVKPTQTLTLTCTFSGFSLSTSGMSVGWIRQPPGKALEWLADIWWDMSYNLLGFLQRSSNFQCQKLLWQLNGRLEYCLKDRMNFDIPEEIKQLQQFQKEDAALTIYEMLQNIFAIFRQDSSSTGWNETIVENLLANVYHQINHLKTVLEEKLEKEDFTRGKLMSSLHLKRYYGRILHYLKAKEYSHCAWTIVRVEILRNFYFINRLTGYLRNDKKDYNPSLKSRLTISKDTSKNQVVLKVTNMDPADTATYYCARSMITNWYFDVWGAGTTVTVSSASTKGPSVFPLAPSSKSTSGGTAALGCLVKDYFPEPVTVSWNSGALTSGVHTFPAVLQSSGLYSLSSVVTVPSSSLGTQTYICNVNHKPSNTKVDKRVEPKSCDKTHTCPPCPAPELLGGPSVFLFPPKPKDTLMISRTPEVTCVVVAVSHEDPEVKFNWYVDGVEVHNAKTKPREEQYNSTYRVVSVLTVLHQDWLNGKEYKCKVSNKALAAPIEKTISKAKGQPREPQVYTLPPSREEMTKNQVSLTCLVKGFYPSDIAVEWESNGQPENNYKTTPPVLDSDGSFFLYSKLTVDKSRWQQGNVFSCSVMHEALHNHYTQKSLSLSPGK

SEQ ID NO: 2713 - protein, 10 aa, Artificial Sequence
  source: /note="Description of Artificial Sequence: Synthetic peptide"
KAQLSVGYMH

SEQ ID NO: 2714 - protein, 7 aa, Artificial Sequence
  source: /note="Description of Artificial Sequence: Synthetic peptide"
DTSKLAS

SEQ ID NO: 2715 - protein, 9 aa, Artificial Sequence
  source: /note="Description of Artificial Sequence: Synthetic peptide"
FQGSGYPFT

SEQ ID NO: 2716 - protein, 6 aa, Artificial Sequence
  source: /note="Description of Artificial Sequence: Synthetic peptide"
QLSVGY

SEQ ID NO: 2717 - protein, 3 aa, Artificial Sequence
  source: /note="Description of Artificial Sequence: Synthetic peptide"
DTS

SEQ ID NO: 2718 - protein, 6 aa, Artificial Sequence
  source: /note="Description of Artificial Sequence: Synthetic peptide"
GSGYPF

SEQ ID NO: 2719 - protein, 106 aa, Artificial Sequence; identical to SEQ ID NO: 15
  source: /note="Description of Artificial Sequence: Synthetic polypeptide"

SEQ ID NO: 2720 - protein, 213 aa, Artificial Sequence; identical to SEQ ID NO: 16
  source: /note="Description of Artificial Sequence: Synthetic polypeptide"

SEQ ID NO: 2721 - protein, 7 aa, Artificial Sequence
  source: /note="Description of Artificial Sequence: Synthetic peptide"
TSGMSVG

SEQ ID NO: 2722 - protein, 16 aa, Artificial Sequence
  source: /note="Description of Artificial Sequence: Synthetic peptide"
DIWWDDKKDYNPSLKS

SEQ ID NO: 2723 - protein, 176 aa, Artificial Sequence
  source: /note="Description of Artificial Sequence: Synthetic polypeptide"
SMITMSYNLLGFLQRSSNFQCQKLLWQLNGRLEYCLKDRMNFDIPEEIKQLQQFQKEDAALTIYEMLQNIFAIFRQDSSSTGWNETIVENLLANVYHQINHLKTVLEEKLEKEDFTRGKLMSSLHLKRYYGRILHYLKAKEYSHCAWTIVRVEILRNFYFINRLTGYLRNNWYFDV

SEQ ID NO: 2724 - protein, 9 aa, Artificial Sequence
  source: /note="Description of Artificial Sequence: Synthetic peptide"
GFSLSTSGM

SEQ ID NO: 2725 - protein, 5 aa, Artificial Sequence
  source: /note="Description of Artificial Sequence: Synthetic peptide"
WWDDK

SEQ ID NO: 2726 - protein, 176 aa, Artificial Sequence; identical to SEQ ID NO: 2723
  source: /note="Description of Artificial Sequence: Synthetic polypeptide"

SEQ ID NO: 2727 - protein, 286 aa, Artificial Sequence
  source: /note="Description of Artificial Sequence: Synthetic polypeptide"
QVTLRESGPALVKPTQTLTLTCTFSGFSLSTSGMSVGWIRQPPGKALEWLADIWWDDKKDYNPSLKSRLTISKDTSKNQVVLKVTNMDPADTATYYCARSMITMSYNLLGFLQRSSNFQCQKLLWQLNGRLEYCLKDRMNFDIPEEIKQLQQFQKEDAALTIYEMLQNIFAIFRQDSSSTGWNETIVENLLANVYHQINHLKTVLEEKLEKEDFTRGKLMSSLHLKRYYGRILHYLKAKEYSHCAWTIVRVEILRNFYFINRLTGYLRNNWYFDVWGAGTTVTVSS

SEQ ID NO: 2728 - protein, 616 aa, Artificial Sequence
  source: /note="Description of Artificial Sequence: Synthetic polypeptide"
QVTLRESGPALVKPTQTLTLTCTFSGFSLSTSGMSVGWIRQPPGKALEWLADIWWDDKKDYNPSLKSRLTISKDTSKNQVVLKVTNMDPADTATYYCARSMITMSYNLLGFLQRSSNFQCQKLLWQLNGRLEYCLKDRMNFDIPEEIKQLQQFQKEDAALTIYEMLQNIFAIFRQDSSSTGWNETIVENLLANVYHQINHLKTVLEEKLEKEDFTRGKLMSSLHLKRYYGRILHYLKAKEYSHCAWTIVRVEILRNFYFINRLTGYLRNNWYFDVWGAGTTVTVSSASTKGPSVFPLAPSSKSTSGGTAALGCLVKDYFPEPVTVSWNSGALTSGVHTFPAVLQSSGLYSLSSVVTVPSSSLGTQTYICNVNHKPSNTKVDKRVEPKSCDKTHTCPPCPAPELLGGPSVFLFPPKPKDTLMISRTPEVTCVVVAVSHEDPEVKFNWYVDGVEVHNAKTKPREEQYNSTYRVVSVLTVLHQDWLNGKEYKCKVSNKALAAPIEKTISKAKGQPREPQVYTLPPSREEMTKNQVSLTCLVKGFYPSDIAVEWESNGQPENNYKTTPPVLDSDGSFFLYSKLTVDKSRWQQGNVFSCSVMHEALHNHYTQKSLSLSPGK

SEQ ID NO: 2729 - protein, 10 aa, Artificial Sequence
  source: /note="Description of Artificial Sequence: Synthetic peptide"
KAQLSVGYMH

SEQ ID NO: 2730 - protein, 7 aa, Artificial Sequence
  source: /note="Description of Artificial Sequence: Synthetic peptide"
DTSKLAS

SEQ ID NO: 2731 - protein, 9 aa, Artificial Sequence
  source: /note="Description of Artificial Sequence: Synthetic peptide"
FQGSGYPFT

SEQ ID NO: 2732 - protein, 6 aa, Artificial Sequence
  source: /note="Description of Artificial Sequence: Synthetic peptide"
QLSVGY

SEQ ID NO: 2733 - protein, 3 aa, Artificial Sequence
  source: /note="Description of Artificial Sequence: Synthetic peptide"
DTS

SEQ ID NO: 2734 - protein, 6 aa, Artificial Sequence
  source: /note="Description of Artificial Sequence: Synthetic peptide"
GSGYPF

SEQ ID NO: 2735 - protein, 106 aa, Artificial Sequence; identical to SEQ ID NO: 15
  source: /note="Description of Artificial Sequence: Synthetic polypeptide"

SEQ ID NO: 2736 - protein, 213 aa, Artificial Sequence; identical to SEQ ID NO: 16
  source: /note="Description of Artificial Sequence: Synthetic polypeptide"

SEQ ID NO: 2737 - protein, 7 aa, Artificial Sequence
  source: /note="Description of Artificial Sequence: Synthetic peptide"
TSGMSVG

SEQ ID NO: 2738 - protein, 15 aa, Artificial Sequence
  source: /note="Description of Artificial Sequence: Synthetic peptide"
DIWWDDKKDYNPSLK

SEQ ID NO: 2739 - protein, 10 aa, Artificial Sequence
  source: /note="Description of Artificial Sequence: Synthetic peptide"
SMITNWYFDV

SEQ ID NO: 2740 - protein, 9 aa, Artificial Sequence
  source: /note="Description of Artificial Sequence: Synthetic peptide"
GFSLSTSGM

SEQ ID NO: 2741 - protein, 5 aa, Artificial Sequence
  source: /note="Description of Artificial Sequence: Synthetic peptide"
WWDDK

SEQ ID NO: 2742 - protein, 10 aa, Artificial Sequence
  source: /note="Description of Artificial Sequence: Synthetic peptide"
SMITNWYFDV

SEQ ID NO: 2743 - protein, 120 aa, Artificial Sequence; identical to SEQ ID NO: 55
  source: /note="Description of Artificial Sequence: Synthetic polypeptide"

SEQ ID NO: 2744 - protein, 450 aa, Artificial Sequence; identical to SEQ ID NO: 56
  source: /note="Description of Artificial Sequence: Synthetic polypeptide"

SEQ ID NO: 2745 - protein, 176 aa, Artificial Sequence
  source: /note="Description of Artificial Sequence: Synthetic polypeptide"
KAQLSMSYNLLGFLQRSSNFQCQKLLWQLNGRLEYCLKDRMNFDIPEEIKQLQQFQKEDAALTIYEMLQNIFAIFRQDSSSTGWNETIVENLLANVYHQINHLKTVLEEKLEKEDFTRGKLMSSLHLKRYYGRILHYLKAKEYSHCAWTIVRVEILRNFYFINRLTGYLRNVGYMH

SEQ ID NO: 2746 - protein, 7 aa, Artificial Sequence
  source: /note="Description of Artificial Sequence: Synthetic peptide"
DTSKLAS

SEQ ID NO: 2747 - protein, 9 aa, Artificial Sequence
  source: /note="Description of Artificial Sequence: Synthetic peptide"
FQGSGYPFT

SEQ ID NO: 2748 - protein, 172 aa, Artificial Sequence
  source: /note="Description of Artificial Sequence: Synthetic polypeptide"
QLSMSYNLLGFLQRSSNFQCQKLLWQLNGRLEYCLKDRMNFDIPEEIKQLQQFQKEDAALTIYEMLQNIFAIFRQDSSSTGWNETIVENLLANVYHQINHLKTVLEEKLEKEDFTRGKLMSSLHLKRYYGRILHYLKAKEYSHCAWTIVRVEILRNFYFINRLTGYLRNVGY

SEQ ID NO: 2749 - protein, 3 aa, Artificial Sequence
  source: /note="Description of Artificial Sequence: Synthetic peptide"
DTS

SEQ ID NO: 2750 - protein, 6 aa, Artificial Sequence
  source: /note="Description of Artificial Sequence: Synthetic peptide"
GSGYPF

SEQ ID NO: 2751 - protein, 272 aa, Artificial Sequence
  source: /note="Description of Artificial Sequence: Synthetic polypeptide"
DIQMTQSPSTLSASVGDRVTITCKAQLSMSYNLLGFLQRSSNFQCQKLLWQLNGRLEYCLKDRMNFDIPEEIKQLQQFQKEDAALTIYEMLQNIFAIFRQDSSSTGWNETIVENLLANVYHQINHLKTVLEEKLEKEDFTRGKLMSSLHLKRYYGRILHYLKAKEYSHCAWTIVRVEILRNFYFINRLTGYLRNVGYMHWYQQKPGKAPKLLIYDTSKLASGVPSRFSGSGSGTEFTLTISSLQPDDFATYYCFQGSGYPFTFGGGTKLEIK

SEQ ID NO: 2752 - protein, 379 aa, Artificial Sequence
  source: /note="Description of Artificial Sequence: Synthetic polypeptide"
DIQMTQSPSTLSASVGDRVTITCKAQLSMSYNLLGFLQRSSNFQCQKLLWQLNGRLEYCLKDRMNFDIPEEIKQLQQFQKEDAALTIYEMLQNIFAIFRQDSSSTGWNETIVENLLANVYHQINHLKTVLEEKLEKEDFTRGKLMSSLHLKRYYGRILHYLKAKEYSHCAWTIVRVEILRNFYFINRLTGYLRNVGYMHWYQQKPGKAPKLLIYDTSKLASGVPSRFSGSGSGTEFTLTISSLQPDDFATYYCFQGSGYPFTFGGGTKLEIKRTVAAPSVFIFPPSDEQLKSGTASVVCLLNNFYPREAKVQWKVDNALQSGNSQESVTEQDSKDSTYSLSSTLTLSKADYEKHKVYACEVTHQGLSSPVTKSFNRGEC

SEQ ID NO: 2753 - protein, 7 aa, Artificial Sequence
  source: /note="Description of Artificial Sequence: Synthetic peptide"
TSGMSVG

SEQ ID NO: 2754 - protein, 15 aa, Artificial Sequence
  source: /note="Description of Artificial Sequence: Synthetic peptide"
DIWWDDKKDYNPSLK

SEQ ID NO: 2755 - protein, 10 aa, Artificial Sequence
  source: /note="Description of Artificial Sequence: Synthetic peptide"
SMITNWYFDV

SEQ ID NO: 2756 - protein, 9 aa, Artificial Sequence
  source: /note="Description of Artificial Sequence: Synthetic peptide"
GFSLSTSGM

SEQ ID NO: 2757 - protein, 5 aa, Artificial Sequence
  source: /note="Description of Artificial Sequence: Synthetic peptide"
WWDDK

SEQ ID NO: 2758 - protein, 10 aa, Artificial Sequence
  source: /note="Description of Artificial Sequence: Synthetic peptide"
SMITNWYFDV

SEQ ID NO: 2759 - protein, 120 aa, Artificial Sequence; identical to SEQ ID NO: 55
  source: /note="Description of Artificial Sequence: Synthetic polypeptide"

SEQ ID NO: 2760 - protein, 450 aa, Artificial Sequence; identical to SEQ ID NO: 56
  source: /note="Description of Artificial Sequence: Synthetic polypeptide"

SEQ ID NO: 2761 - protein, 10 aa, Artificial Sequence
  source: /note="Description of Artificial Sequence: Synthetic peptide"
KAQLSVGYMH

SEQ ID NO: 2762 - protein, 173 aa, Artificial Sequence
  source: /note="Description of Artificial Sequence: Synthetic polypeptide"
DTMSYNLLGFLQRSSNFQCQKLLWQLNGRLEYCLKDRMNFDIPEEIKQLQQFQKEDAALTIYEMLQNIFAIFRQDSSSTGWNETIVENLLANVYHQINHLKTVLEEKLEKEDFTRGKLMSSLHLKRYYGRILHYLKAKEYSHCAWTIVRVEILRNFYFINRLTGYLRNSKLAS

SEQ ID NO: 2763 - protein, 9 aa, Artificial Sequence
  source: /note="Description of Artificial Sequence: Synthetic peptide"
FQGSGYPFT

SEQ ID NO: 2764 - protein, 6 aa, Artificial Sequence
  source: /note="Description of Artificial Sequence: Synthetic peptide"
QLSVGY

SEQ ID NO: 2765 - protein, 169 aa, Artificial Sequence
  source: /note="Description of Artificial Sequence: Synthetic polypeptide"
DTMSYNLLGFLQRSSNFQCQKLLWQLNGRLEYCLKDRMNFDIPEEIKQLQQFQKEDAALTIYEMLQNIFAIFRQDSSSTGWNETIVENLLANVYHQINHLKTVLEEKLEKEDFTRGKLMSSLHLKRYYGRILHYLKAKEYSHCAWTIVRVEILRNFYFINRLTGYLRNS

SEQ ID NO: 2766 - protein, 6 aa, Artificial Sequence
  source: /note="Description of Artificial Sequence: Synthetic peptide"
GSGYPF

SEQ ID NO: 2767 - protein, 272 aa, Artificial Sequence
  source: /note="Description of Artificial Sequence: Synthetic polypeptide"
DIQMTQSPSTLSASVGDRVTITCKAQLSVGYMHWYQQKPGKAPKLLIYDTMSYNLLGFLQRSSNFQCQKLLWQLNGRLEYCLKDRMNFDIPEEIKQLQQFQKEDAALTIYEMLQNIFAIFRQDSSSTGWNETIVENLLANVYHQINHLKTVLEEKLEKEDFTRGKLMSSLHLKRYYGRILHYLKAKEYSHCAWTIVRVEILRNFYFINRLTGYLRNSKLASGVPSRFSGSGSGTEFTLTISSLQPDDFATYYCFQGSGYPFTFGGGTKLEIK

SEQ ID NO: 2768 - protein, 379 aa, Artificial Sequence
  source: /note="Description of Artificial Sequence: Synthetic polypeptide"
DIQMTQSPSTLSASVGDRVTITCKAQLSVGYMHWYQQKPGKAPKLLIYDTMSYNLLGFLQRSSNFQCQKLLWQLNGRLEYCLKDRMNFDIPEEIKQLQQFQKEDAALTIYEMLQNIFAIFRQDSSSTGWNETIVENLLANVYHQINHLKTVLEEKLEKEDFTRGKLMSSLHLKRYYGRILHYLKAKEYSHCAWTIVRVEILRNFYFINRLTGYLRNSKLASGVPSRFSGSGSGTEFTLTISSLQPDDFATYYCFQGSGYPFTFGGGTKLEIKRTVAAPSVFIFPPSDEQLKSGTASVVCLLNNFYPREAKVQWKVDNALQSGNSQESVTEQDSKDSTYSLSSTLTLSKADYEKHKVYACEVTHQGLSSPVTKSFNRGEC

SEQ ID NO: 2769 - protein, 7 aa, Artificial Sequence
  source: /note="Description of Artificial Sequence: Synthetic peptide"
TSGMSVG

SEQ ID NO: 2770 - protein, 15 aa, Artificial Sequence
  source: /note="Description of Artificial Sequence: Synthetic peptide"
DIWWDDKKDYNPSLK

SEQ ID NO: 2771 - protein, 10 aa, Artificial Sequence
  source: /note="Description of Artificial Sequence: Synthetic peptide"
SMITNWYFDV

SEQ ID NO: 2772 - protein, 9 aa, Artificial Sequence
  source: /note="Description of Artificial Sequence: Synthetic peptide"
GFSLSTSGM

SEQ ID NO: 2773 - protein, 5 aa, Artificial Sequence
  source: /note="Description of Artificial Sequence: Synthetic peptide"
WWDDK

SEQ ID NO: 2774 - protein, 10 aa, Artificial Sequence
  source: /note="Description of Artificial Sequence: Synthetic peptide"
SMITNWYFDV

SEQ ID NO: 2775 - protein, 120 aa, Artificial Sequence; identical to SEQ ID NO: 55
  source: /note="Description of Artificial Sequence: Synthetic polypeptide"

SEQ ID NO: 2776 - protein, 450 aa, Artificial Sequence; identical to SEQ ID NO: 56
  source: /note="Description of Artificial Sequence: Synthetic polypeptide"

SEQ ID NO: 2777 - protein, 10 aa, Artificial Sequence
  source: /note="Description of Artificial Sequence: Synthetic peptide"
KAQLSVGYMH

SEQ ID NO: 2778 - protein, 7 aa, Artificial Sequence
  source: /note="Description of Artificial Sequence: Synthetic peptide"
DTSKLAS

SEQ ID NO: 2779 - protein, 175 aa, Artificial Sequence
  source: /note="Description of Artificial Sequence: Synthetic polypeptide"
FQGSGMSYNLLGFLQRSSNFQCQKLLWQLNGRLEYCLKDRMNFDIPEEIKQLQQFQKEDAALTIYEMLQNIFAIFRQDSSSTGWNETIVENLLANVYHQINHLKTVLEEKLEKEDFTRGKLMSSLHLKRYYGRILHYLKAKEYSHCAWTIVRVEILRNFYFINRLTGYLRNYPFT

SEQ ID NO: 2780 - protein, 6 aa, Artificial Sequence
  source: /note="Description of Artificial Sequence: Synthetic peptide"
QLSVGY

SEQ ID NO: 2781 - protein, 3 aa, Artificial Sequence
  source: /note="Description of Artificial Sequence: Synthetic peptide"
DTS

SEQ ID NO: 2782 - protein, 172 aa, Artificial Sequence
  source: /note="Description of Artificial Sequence: Synthetic polypeptide"
GSGMSYNLLGFLQRSSNFQCQKLLWQLNGRLEYCLKDRMNFDIPEEIKQLQQFQKEDAALTIYEMLQNIFAIFRQDSSSTGWNETIVENLLANVYHQINHLKTVLEEKLEKEDFTRGKLMSSLHLKRYYGRILHYLKAKEYSHCAWTIVRVEILRNFYFINRLTGYLRNYPF

SEQ ID NO: 2783 - protein, 272 aa, Artificial Sequence
  source: /note="Description of Artificial Sequence: Synthetic polypeptide"
DIQMTQSPSTLSASVGDRVTITCKAQLSVGYMHWYQQKPGKAPKLLIYDTSKLASGVPSRFSGSGSGTEFTLTISSLQPDDFATYYCFQGSGMSYNLLGFLQRSSNFQCQKLLWQLNGRLEYCLKDRMNFDIPEEIKQLQQFQKEDAALTIYEMLQNIFAIFRQDSSSTGWNETIVENLLANVYHQINHLKTVLEEKLEKEDFTRGKLMSSLHLKRYYGRILHYLKAKEYSHCAWTIVRVEILRNFYFINRLTGYLRNYPFTFGGGTKLEIK

SEQ ID NO: 2784 - protein, 379 aa, Artificial Sequence
  source: /note="Description of Artificial Sequence: Synthetic polypeptide"
DIQMTQSPSTLSASVGDRVTITCKAQLSVGYMHWYQQKPGKAPKLLIYDTSKLASGVPSRFSGSGSGTEFTLTISSLQPDDFATYYCFQGSGMSYNLLGFLQRSSNFQCQKLLWQLNGRLEYCLKDRMNFDIPEEIKQLQQFQKEDAALTIYEMLQNIFAIFRQDSSSTGWNETIVENLLANVYHQINHLKTVLEEKLEKEDFTRGKLMSSLHLKRYYGRILHYLKAKEYSHCAWTIVRVEILRNFYFINRLTGYLRNYPFTFGGGTKLEIKRTVAAPSVFIFPPSDEQLKSGTASVVCLLNNFYPREAKVQWKVDNALQSGNSQESVTEQDSKDSTYSLSSTLTLSKADYEKHKVYACEVTHQGLSSPVTKSFNRGEC

SEQ ID NO: 2785 - protein, 150 aa, Artificial Sequence
  source: /note="Description of Artificial Sequence: Synthetic polypeptide"
DPYVKEAENLKKYFNAGHSDVADNGTLFLGILKNWKEESDRKIMQSQIVSFYFKLFKNFKDDQSIQKSVETIKEDMNVKFFNSNKKKRDDFEKLTNYSVTDLNVQRKAIHELIQVMAELSPAAKTGKRKRSQMLFRGRRASQSTSGMSVG

SEQ ID NO: 2786 - protein, 16 aa, Artificial Sequence
  source: /note="Description of Artificial Sequence: Synthetic peptide"
DIWWDDKKDYNPSLKS

SEQ ID NO: 2787 - protein, 10 aa, Artificial Sequence
  source: /note="Description of Artificial Sequence: Synthetic peptide"
SMITNWYFDV

SEQ ID NO: 2788 - protein, 152 aa, Artificial Sequence
  source: /note="Description of Artificial Sequence: Synthetic polypeptide"
GFSLQDPYVKEAENLKKYFNAGHSDVADNGTLFLGILKNWKEESDRKIMQSQIVSFYFKLFKNFKDDQSIQKSVETIKEDMNVKFFNSNKKKRDDFEKLTNYSVTDLNVQRKAIHELIQVMAELSPAAKTGKRKRSQMLFRGRRASQSTSGM

SEQ ID NO: 2789 - protein, 5 aa, Artificial Sequence
  source: /note="Description of Artificial Sequence: Synthetic peptide"
WWDDK

SEQ ID NO: 2790 - protein, 10 aa, Artificial Sequence
  source: /note="Description of Artificial Sequence: Synthetic peptide"
SMITNWYFDV

SEQ ID NO: 2791 - protein, 263 aa, Artificial Sequence
  source: /note="Description of Artificial Sequence: Synthetic polypeptide"
QVTLRESGPALVKPTQTLTLTCTFSGFSLQDPYVKEAENLKKYFNAGHSDVADNGTLFLGILKNWKEESDRKIMQSQIVSFYFKLFKNFKDDQSIQKSVETIKEDMNVKFFNSNKKKRDDFEKLTNYSVTDLNVQRKAIHELIQVMAELSPAAKTGKRKRSQMLFRGRRASQSTSGMSVGWIRQPPGKALEWLADIWWDDKKDYNPSLKSRLTISKDTSKNQVVLKVTNMDPADTATYYCARSMITNWYFDVWGAGTTVTVSS

SEQ ID NO: 2792 - protein, 593 aa, Artificial Sequence
  source: /note="Description of Artificial Sequence: Synthetic polypeptide"
QVTLRESGPALVKPTQTLTLTCTFSGFSLQDPYVKEAENLKKYFNAGHSDVADNGTLFLGILKNWKEESDRKIMQSQIVSFYFKLFKNFKDDQSIQKSVETIKEDMNVKFFNSNKKKRDDFEKLTNYSVTDLNVQRKAIHELIQVMAELSPAAKTGKRKRSQMLFRGRRASQSTSGMSVGWIRQPPGKALEWLADIWWDDKKDYNPSLKSRLTISKDTSKNQVVLKVTNMDPADTATYYCARSMITNWYFDVWGAGTTVTVSSASTKGPSVFPLAPSSKSTSGGTAALGCLVKDYFPEPVTVSWNSGALTSGVHTFPAVLQSSGLYSLSSVVTVPSSSLGTQTYICNVNHKPSNTKVDKRVEPKSCDKTHTCPPCPAPELLGGPSVFLFPPKPKDTLMISRTPEVTCVVVAVSHEDPEVKFNWYVDGVEVHNAKTKPREEQYNSTYRVVSVLTVLHQDWLNGKEYKCKVSNKALAAPIEKTISKAKGQPREPQVYTLPPSREEMTKNQVSLTCLVKGFYPSDIAVEWESNGQPENNYKTTPPVLDSDGSFFLYSKLTVDKSRWQQGNVFSCSVMHEALHNHYTQKSLSLSPGK

SEQ ID NO: 2793 - protein, 10 aa, Artificial Sequence
  source: /note="Description of Artificial Sequence: Synthetic peptide"
KAQLSVGYMH

SEQ ID NO: 2794 - protein, 7 aa, Artificial Sequence
  source: /note="Description of Artificial Sequence: Synthetic peptide"
DTSKLAS

SEQ ID NO: 2795 - protein, 9 aa, Artificial Sequence
  source: /note="Description of Artificial Sequence: Synthetic peptide"
FQGSGYPFT

SEQ ID NO: 2796 - protein, 6 aa, Artificial Sequence
  source: /note="Description of Artificial Sequence: Synthetic peptide"
QLSVGY

SEQ ID NO: 2797 - protein, 3 aa, Artificial Sequence
  source: /note="Description of Artificial Sequence: Synthetic peptide"
DTS

SEQ ID NO: 2798 - protein, 6 aa, Artificial Sequence
  source: /note="Description of Artificial Sequence: Synthetic peptide"
GSGYPF

SEQ ID NO: 2799 - protein, 106 aa, Artificial Sequence; identical to SEQ ID NO: 15
  source: /note="Description of Artificial Sequence: Synthetic polypeptide"

SEQ ID NO: 2800 - protein, 213 aa, Artificial Sequence; identical to SEQ ID NO: 16
  source: /note="Description of Artificial Sequence: Synthetic polypeptide"

SEQ ID NO: 2801 - protein, 7 aa, Artificial Sequence
  source: /note="Description of Artificial Sequence: Synthetic peptide"
TSGMSVG

SEQ ID NO: 2802 - protein, 159 aa, Artificial Sequence
  source: /note="Description of Artificial Sequence: Synthetic polypeptide"
DIWWDQDPYVKEAENLKKYFNAGHSDVADNGTLFLGILKNWKEESDRKIMQSQIVSFYFKLFKNFKDDQSIQKSVETIKEDMNVKFFNSNKKKRDDFEKLTNYSVTDLNVQRKAIHELIQVMAELSPAAKTGKRKRSQMLFRGRRASQDKKDYNPSLKS

SEQ ID NO: 2803 - protein, 10 aa, Artificial Sequence
  source: /note="Description of Artificial Sequence: Synthetic peptide"
SMITNWYFDV

SEQ ID NO: 2804 - protein, 9 aa, Artificial Sequence
  source: /note="Description of Artificial Sequence: Synthetic peptide"
GFSLSTSGM

SEQ ID NO: 2805 - protein, 148 aa, Artificial Sequence
  source: /note="Description of Artificial Sequence: Synthetic polypeptide"
WWDQDPYVKEAENLKKYFNAGHSDVADNGTLFLGILKNWKEESDRKIMQSQIVSFYFKLFKNFKDDQSIQKSVETIKEDMNVKFFNSNKKKRDDFEKLTNYSVTDLNVQRKAIHELIQVMAELSPAAKTGKRKRSQMLFRGRRASQDK

SEQ ID NO: 2806 - protein, 10 aa, Artificial Sequence
  source: /note="Description of Artificial Sequence: Synthetic peptide"
SMITNWYFDV

SEQ ID NO: 2807 - protein, 263 aa, Artificial Sequence
  source: /note="Description of Artificial Sequence: Synthetic polypeptide"
QVTLRESGPALVKPTQTLTLTCTFSGFSLSTSGMSVGWIRQPPGKALEWLADIWWDQDPYVKEAENLKKYFNAGHSDVADNGTLFLGILKNWKEESDRKIMQSQIVSFYFKLFKNFKDDQSIQKSVETIKEDMNVKFFNSNKKKRDDFEKLTNYSVTDLNVQRKAIHELIQVMAELSPAAKTGKRKRSQMLFRGRRASQDKKDYNPSLKSRLTISKDTSANQVVLKVTNMDPADTATYYCARSMITNWYFDVWGAGTTVTVSS

SEQ ID NO: 2808 - protein, 593 aa, Artificial Sequence
  source: /note="Description of Artificial Sequence: Synthetic polypeptide"
QVTLRESGPALVKPTQTLTLTCTFSGFSLSTSGMSVGWIRQPPGKALEWLADIWWDQDPYVKEAENLKKYFNAGHSDVADNGTLFLGILKNWKEESDRKIMQSQIVSFYFKLFKNFKDDQSIQKSVETIKEDMNVKFFNSNKKKRDDFEKLTNYSVTDLNVQRKAIHELIQVMAELSPAAKTGKRKRSQMLFRGRRASQDKKDYNPSLKSRLTISKDTSANQVVLKVTNMDPADTATYYCARSMITNWYFDVWGAGTTVTVSSASTKGPSVFPLAPSSKSTSGGTAALGCLVKDYFPEPVTVSWNSGALTSGVHTFPAVLQSSGLYSLSSVVTVPSSSLGTQTYICNVNHKPSNTKVDKRVEPKSCDKTHTCPPCPAPELLGGPSVFLFPPKPKDTLMISRTPEVTCVVVAVSHEDPEVKFNWYVDGVEVHNAKTKPREEQYNSTYRVVSVLTVLHQDWLNGKEYKCKVSNKALAAPIEKTISKAKGQPREPQVYTLPPSREEMTKNQVSLTCLVKGFYPSDIAVEWESNGQPENNYKTTPPVLDSDGSFFLYSKLTVDKSRWQQGNVFSCSVMHEALHNHYTQKSLSLSPGK

SEQ ID NO: 2809 - protein, 10 aa, Artificial Sequence
  source: /note="Description of Artificial Sequence: Synthetic peptide"
KAQLSVGYMH

SEQ ID NO: 2810 - protein, 7 aa, Artificial Sequence
  source: /note="Description of Artificial Sequence: Synthetic peptide"
DTSKLAS

SEQ ID NO: 2811 - protein, 9 aa, Artificial Sequence
  source: /note="Description of Artificial Sequence: Synthetic peptide"
FQGSGYPFT

SEQ ID NO: 2812 - protein, 6 aa, Artificial Sequence
  source: /note="Description of Artificial Sequence: Synthetic peptide"
QLSVGY

SEQ ID NO: 2813 - protein, 3 aa, Artificial Sequence
  source: /note="Description of Artificial Sequence: Synthetic peptide"
DTS

SEQ ID NO: 2814 - protein, 6 aa, Artificial Sequence
  source: /note="Description of Artificial Sequence: Synthetic peptide"
GSGYPF

SEQ ID NO: 2815 - protein, 106 aa, Artificial Sequence; identical to SEQ ID NO: 15
  source: /note="Description of Artificial Sequence: Synthetic polypeptide"

SEQ ID NO: 2816 - protein, 213 aa, Artificial Sequence; identical to SEQ ID NO: 16
  source: /note="Description of Artificial Sequence: Synthetic polypeptide"

SEQ ID NO: 2817 - protein, 7 aa, Artificial Sequence
  source: /note="Description of Artificial Sequence: Synthetic peptide"
TSGMSVG

SEQ ID NO: 2818 - protein, 16 aa, Artificial Sequence
  source: /note="Description of Artificial Sequence: Synthetic peptide"
DIWWDDKKDYNPSLKS

SEQ ID NO: 2819 - protein, 153 aa, Artificial Sequence
  source: /note="Description of Artificial Sequence: Synthetic polypeptide"
SMITQDPYVKEAENLKKYFNAGHSDVADNGTLFLGILKNWKEESDRKIMQSQIVSFYFKLFKNFKDDQSIQKSVETIKEDMNVKFFNSNKKKRDDFEKLTNYSVTDLNVQRKAIHELIQVMAELSPAAKTGKRKRSQMLFRGRRASQNWYFDV

SEQ ID NO: 2820 - protein, 9 aa, Artificial Sequence
  source: /note="Description of Artificial Sequence: Synthetic peptide"
GFSLSTSGM

SEQ ID NO: 2821 - protein, 5 aa, Artificial Sequence
  source: /note="Description of Artificial Sequence: Synthetic peptide"
WWDDK

SEQ ID NO: 2822 - protein, 153 aa, Artificial Sequence; identical to SEQ ID NO: 2819
  source: /note="Description of Artificial Sequence: Synthetic polypeptide"

SEQ ID NO: 2823 - protein, 263 aa, Artificial Sequence
  source: /note="Description of Artificial Sequence: Synthetic polypeptide"
QVTLRESGPALVKPTQTLTLTCTFSGFSLSTSGMSVGWIRQPPGKALEWLADIWWDDKKDYNPSLKSRLTISKDTSKNQVVLKVTNMDPADTATYYCARSMITQDPYVKEAENLKKYFNAGHSDVADNGTLFLGILKNWKEESDRKIMQSQIVSFYFKLFKNFKDDQSIQKSVETIKEDMNVKFFNSNKKKRDDFEKLTNYSVTDLNVQRKAIHELIQVMAELSPAAKTGKRKRSQMLFRGRRASQNWYFDVWGAGTTVTVSS

SEQ ID NO: 2824 - protein, 593 aa, Artificial Sequence
  source: /note="Description of Artificial Sequence: Synthetic polypeptide"
QVTLRESGPALVKPTQTLTLTCTFSGFSLSTSGMSVGWIRQPPGKALEWLADIWWDDKKDYNPSLKSRLTISKDTSKNQVVLKVTNMDPADTATYYCARSMITQDPYVKEAENLKKYFNAGHSDVADNGTLFLGILKNWKEESDRKIMQSQIVSFYFKLFKNFKDDQSIQKSVETIKEDMNVKFFNSNKKKRDDFEKLTNYSVTDLNVQRKAIHELIQVMAELSPAAKTGKRKRSQMLFRGRRASQNWYFDVWGAGTTVTVSSASTKGPSVFPLAPSSKSTSGGTAALGCLVKDYFPEPVTVSWNSGALTSGVHTFPAVLQSSGLYSLSSVVTVPSSSLGTQTYICNVNHKPSNTKVDKRVEPKSCDKTHTCPPCPAPELLGGPSVFLFPPKPKDTLMISRTPEVTCVVVAVSHEDPEVKFNWYVDGVEVHNAKTKPREEQYNSTYRVVSVLTVLHQDWLNGKEYKCKVSNKALAAPIEKTISKAKGQPREPQVYTLPPSREEMTKNQVSLTCLVKGFYPSDIAVEWESNGQPENNYKTTPPVLDSDGSFFLYSKLTVDKSRWQQGNVFSCSVMHEALHNHYTQKSLSLSPGK

SEQ ID NO: 2825 - protein, 10 aa, Artificial Sequence
  source: /note="Description of Artificial Sequence: Synthetic peptide"
KAQLSVGYMH

SEQ ID NO: 2826 - protein, 7 aa, Artificial Sequence
  source: /note="Description of Artificial Sequence: Synthetic peptide"
DTSKLAS

SEQ ID NO: 2827 - protein, 9 aa, Artificial Sequence
  source: /note="Description of Artificial Sequence: Synthetic peptide"
FQGSGYPFT

SEQ ID NO: 2828 - protein, 6 aa, Artificial Sequence
  source: /note="Description of Artificial Sequence: Synthetic peptide"
QLSVGY

SEQ ID NO: 2829 - protein, 3 aa, Artificial Sequence
  source: /note="Description of Artificial Sequence: Synthetic peptide"
DTS

SEQ ID NO: 2830 - protein, 6 aa, Artificial Sequence
  source: /note="Description of Artificial Sequence: Synthetic peptide"
GSGYPF

SEQ ID NO: 2831 - protein, 106 aa, Artificial Sequence; identical to SEQ ID NO: 15
  source: /note="Description of Artificial Sequence: Synthetic polypeptide"

SEQ ID NO: 2832 - protein, 213 aa, Artificial Sequence; identical to SEQ ID NO: 16
  source: /note="Description of Artificial Sequence: Synthetic polypeptide"

SEQ ID NO: 2833 - protein, 7 aa, Artificial Sequence
  source: /note="Description of Artificial Sequence: Synthetic peptide"
TSGMSVG

SEQ ID NO: 2834 - protein, 15 aa, Artificial Sequence
  source: /note="Description of Artificial Sequence: Synthetic peptide"
DIWWDDKKDYNPSLK

SEQ ID NO: 2835 - protein, 10 aa, Artificial Sequence
  source: /note="Description of Artificial Sequence: Synthetic peptide"
SMITNWYFDV

SEQ ID NO: 2836 - protein, 9 aa, Artificial Sequence
  source: /note="Description of Artificial Sequence: Synthetic peptide"
GFSLSTSGM

SEQ ID NO: 2837 - protein, 5 aa, Artificial Sequence
  source: /note="Description of Artificial Sequence: Synthetic peptide"
WWDDK

SEQ ID NO: 2838 - protein, 10 aa, Artificial Sequence
  source: /note="Description of Artificial Sequence: Synthetic peptide"
SMITNWYFDV

SEQ ID NO: 2839 - protein, 120 aa, Artificial Sequence; identical to SEQ ID NO: 55
  source: /note="Description of Artificial Sequence: Synthetic polypeptide"

SEQ ID NO: 2840 - protein, 450 aa, Artificial Sequence; identical to SEQ ID NO: 56
  source: /note="Description of Artificial Sequence: Synthetic polypeptide"

SEQ ID NO: 2841 - protein, 153 aa, Artificial Sequence
  source: /note="Description of Artificial Sequence: Synthetic polypeptide"
KAQLSQDPYVKEAENLKKYFNAGHSDVADNGTLFLGILKNWKEESDRKIMQSQIVSFYFKLFKNFKDDQSIQKSVETIKEDMNVKFFNSNKKKRDDFEKLTNYSVTDLNVQRKAIHELIQVMAELSPAAKTGKRKRSQMLFRGRRASQVGYMH

SEQ ID NO: 2842 - protein, 7 aa, Artificial Sequence
  source: /note="Description of Artificial Sequence: Synthetic peptide"
DTSKLAS

SEQ ID NO: 2843 - protein, 9 aa, Artificial Sequence
  source: /note="Description of Artificial Sequence: Synthetic peptide"
FQGSGYPFT

SEQ ID NO: 2844 - protein, 149 aa, Artificial Sequence
  source: /note="Description of Artificial Sequence: Synthetic polypeptide"
QLSQDPYVKEAENLKKYFNAGHSDVADNGTLFLGILKNWKEESDRKIMQSQIVSFYFKLFKNFKDDQSIQKSVETIKEDMNVKFFNSNKKKRDDFEKLTNYSVTDLNVQRKAIHELIQVMAELSPAAKTGKRKRSQMLFRGRRASQVGY

SEQ ID NO: 2845 - protein, 3 aa, Artificial Sequence
  source: /note="Description of Artificial Sequence: Synthetic peptide"
DTS

SEQ ID NO: 2846 - protein, 6 aa, Artificial Sequence
  source: /note="Description of Artificial Sequence: Synthetic peptide"
GSGYPF

SEQ ID NO: 2847 - protein, 249 aa, Artificial Sequence
  source: /note="Description of Artificial Sequence: Synthetic polypeptide"
DIQMTQSPSTLSASVGDRVTITCKAQLSQDPYVKEAENLKKYFNAGHSDVADNGTLFLGILKNWKEESDRKIMQSQIVSFYFKLFKNFKDDQSIQKSVETIKEDMNVKFFNSNKKKRDDFEKLTNYSVTDLNVQRKAIHELIQVMAELSPAAKTGKRKRSQMLFRGRRASQVGYMHWYQQKPGKAPKLLIYDTSKLASGVPSRFSGSGSGTEFTLTISSLQPDDFATYYCFQGSGYPFTFGGGTKLEIK

SEQ ID NO: 2848 - protein, 356 aa, Artificial Sequence
  source: /note="Description of Artificial Sequence: Synthetic polypeptide"
DIQMTQSPSTLSASVGDRVTITCKAQLSQDPYVKEAENLKKYFNAGHSDVADNGTLFLGILKNWKEESDRKIMQSQIVSFYFKLFKNFKDDQSIQKSVETIKEDMNVKFFNSNKKKRDDFEKLTNYSVTDLNVQRKAIHELIQVMAELSPAAKTGKRKRSQMLFRGRRASQVGYMHWYQQKPGKAPKLLIYDTSKLASGVPSRFSGSGSGTEFTLTISSLQPDDFATYYCFQGSGYPFTFGGGTKLEIKRTVAAPSVFIFPPSDEQLKSGTASVVCLLNNFYPREAKVQWKVDNALQSGNSQESVTEQDSKDSTYSLSSTLTLSKADYEKHKVYACEVTHQGLSSPVTKSFNRGEC

SEQ ID NO: 2849 - protein, 7 aa, Artificial Sequence
  source: /note="Description of Artificial Sequence: Synthetic peptide"
TSGMSVG

SEQ ID NO: 2850 - protein, 15 aa, Artificial Sequence
  source: /note="Description of Artificial Sequence: Synthetic peptide"
DIWWDDKKDYNPSLK

SEQ ID NO: 2851 - protein, 10 aa, Artificial Sequence
  source: /note="Description of Artificial Sequence: Synthetic peptide"
SMITNWYFDV

SEQ ID NO: 2852 - protein, 9 aa, Artificial Sequence
  source: /note="Description of Artificial Sequence: Synthetic peptide"
GFSLSTSGM

SEQ ID NO: 2853 - protein, 5 aa, Artificial Sequence
  source: /note="Description of Artificial Sequence: Synthetic peptide"
WWDDK

SEQ ID NO: 2854 - protein, 10 aa, Artificial Sequence
  source: /note="Description of Artificial Sequence: Synthetic peptide"
SMITNWYFDV

SEQ ID NO: 2855 - protein, 120 aa, Artificial Sequence; identical to SEQ ID NO: 55
  source: /note="Description of Artificial Sequence: Synthetic polypeptide"

SEQ ID NO: 2856 - protein, 450 aa, Artificial Sequence; identical to SEQ ID NO: 56
  source: /note="Description of Artificial Sequence: Synthetic polypeptide"

SEQ ID NO: 2857 - protein, 10 aa, Artificial Sequence
  source: /note="Description of Artificial Sequence: Synthetic peptide"
KAQLSVGYMH

SEQ ID NO: 2858 - protein, 150 aa, Artificial Sequence
  source: /note="Description of Artificial Sequence: Synthetic polypeptide"
DTQDPYVKEAENLKKYFNAGHSDVADNGTLFLGILKNWKEESDRKIMQSQIVSFYFKLFKNFKDDQSIQKSVETIKEDMNVKFFNSNKKKRDDFEKLTNYSVTDLNVQRKAIHELIQVMAELSPAAKTGKRKRSQMLFRGRRASQSKLAS

SEQ ID NO: 2859 - protein, 9 aa, Artificial Sequence
  source: /note="Description of Artificial Sequence: Synthetic peptide"
FQGSGYPFT

SEQ ID NO: 2860 - protein, 6 aa, Artificial Sequence
  source: /note="Description of Artificial Sequence: Synthetic peptide"
QLSVGY

SEQ ID NO: 2861 - protein, 146 aa, Artificial Sequence
  source: /note="Description of Artificial Sequence: Synthetic polypeptide"
DTQDPYVKEAENLKKYFNAGHSDVADNGTLFLGILKNWKEESDRKIMQSQIVSFYFKLFKNFKDDQSIQKSVETIKEDMNVKFFNSNKKKRDDFEKLTNYSVTDLNVQRKAIHELIQVMAELSPAAKTGKRKRSQMLFRGRRASQS

SEQ ID NO: 2862 - protein, 6 aa, Artificial Sequence
  source: /note="Description of Artificial Sequence: Synthetic peptide"
GSGYPF

SEQ ID NO: 2863 - protein, 249 aa, Artificial Sequence
  source: /note="Description of Artificial Sequence: Synthetic polypeptide"
DIQMTQSPSTLSASVGDRVTITCKAQLSVGYMHWYQQKPGKAPKLLIYDTQDPYVKEAENLKKYFNAGHSDVADNGTLFLGILKNWKEESDRKIMQSQIVSFYFKLFKNFKDDQSIQKSVETIKEDMNVKFFNSNKKKRDDFEKLTNYSVTDLNVQRKAIHELIQVMAELSPAAKTGKRKRSQMLFRGRRASQSKLASGVPSRFSGSGSGTEFTLTISSLQPDDFATYYCFQGSGYPFTFGGGTKLEIK

SEQ ID NO: 2864 - protein, 356 aa, Artificial Sequence
  source: /note="Description of Artificial Sequence: Synthetic polypeptide"
DIQMTQSPSTLSASVGDRVTITCKAQLSVGYMHWYQQKPGKAPKLLIYDTQDPYVKEAENLKKYFNAGHSDVADNGTLFLGILKNWKEESDRKIMQSQIVSFYFKLFKNFKDDQSIQKSVETIKEDMNVKFFNSNKKKRDDFEKLTNYSVTDLNVQRKAIHELIQVMAELSPAAKTGKRKRSQMLFRGRRASQSKLASGVPSRFSGSGSGTEFTLTISSLQPDDFATYYCFQGSGYPFTFGGGTKLEIKRTVAAPSVFIFPPSDEQLKSGTASVVCLLNNFYPREAKVQWKVDNALQSGNSQESVTEQDSKDSTYSLSSTLTLSKADYEKHKVYACEVTHQGLSSPVTKSFNRGEC

SEQ ID NO: 2865 - protein, 7 aa, Artificial Sequence
  source: /note="Description of Artificial Sequence: Synthetic peptide"
TSGMSVG

SEQ ID NO: 2866 - protein, 15 aa, Artificial Sequence
  source: /note="Description of Artificial Sequence: Synthetic peptide"
DIWWDDKKDYNPSLK

SEQ ID NO: 2867 - protein, 10 aa, Artificial Sequence
  source: /note="Description of Artificial Sequence: Synthetic peptide"
SMITNWYFDV

SEQ ID NO: 2868 - protein, 9 aa, Artificial Sequence
  source: /note="Description of Artificial Sequence: Synthetic peptide"
GFSLSTSGM

SEQ ID NO: 2869 - protein, 5 aa, Artificial Sequence
  source: /note="Description of Artificial Sequence: Synthetic peptide"
WWDDK

SEQ ID NO: 2870 - protein, 10 aa, Artificial Sequence
  source: /note="Description of Artificial Sequence: Synthetic peptide"
SMITNWYFDV

SEQ ID NO: 2871 - protein, 120 aa, Artificial Sequence; identical to SEQ ID NO: 55
  source: /note="Description of Artificial Sequence: Synthetic polypeptide"

SEQ ID NO: 2872 - protein, 450 aa, Artificial Sequence; identical to SEQ ID NO: 56
  source: /note="Description of Artificial Sequence: Synthetic polypeptide"

SEQ ID NO: 2873 - protein, 10 aa, Artificial Sequence
  source: /note="Description of Artificial Sequence: Synthetic peptide"
KAQLSVGYMH

SEQ ID NO: 2874 - protein, 7 aa, Artificial Sequence
  source: /note="Description of Artificial Sequence: Synthetic peptide"
DTSKLAS

SEQ ID NO: 2875 - protein, 152 aa, Artificial Sequence
  source: /note="Description of Artificial Sequence: Synthetic polypeptide"
FQGSGQDPYVKEAENLKKYFNAGHSDVADNGTLFLGILKNWKEESDRKIMQSQIVSFYFKLFKNFKDDQSIQKSVETIKEDMNVKFFNSNKKKRDDFEKLTNYSVTDLNVQRKAIHELIQVMAELSPAAKTGKRKRSQMLFRGRRASQYPFT

SEQ ID NO: 2876 - protein, 6 aa, Artificial Sequence
  source: /note="Description of Artificial Sequence: Synthetic peptide"
QLSVGY

SEQ ID NO: 2877 - protein, 3 aa, Artificial Sequence
  source: /note="Description of Artificial Sequence: Synthetic peptide"
DTS

SEQ ID NO: 2878 - protein, 149 aa, Artificial Sequence
  source: /note="Description of Artificial Sequence: Synthetic polypeptide"
GSGQDPYVKEAENLKKYFNAGHSDVADNGTLFLGILKNWKEESDRKIMQSQIVSFYFKLFKNFKDDQSIQKSVETIKEDMNVKFFNSNKKKRDDFEKLTNYSVTDLNVQRKAIHELIQVMAELSPAAKTGKRKRSQMLFRGRRASQYPF

SEQ ID NO: 2879 - protein, 249 aa, Artificial Sequence
  source: /note="Description of Artificial Sequence: Synthetic polypeptide"
DIQMTQSPSTLSASVGDRVTITCKAQLSVGYMHWYQQKPGKAPKLLIYDTSKLASGVPSRFSGSGSGTEFTLTISSLQPDDFATYYCFQGSGQDPYVKEAENLKKYFNAGHSDVADNGTLFLGILKNWKEESDRKIMQSQIVSFYFKLFKNFKDDQSIQKSVETIKEDMNVKFFNSNKKKRDDFEKLTNYSVTDLNVQRKAIHELIQVMAELSPAAKTGKRKRSQMLFRGRRASQYPFTFGGGTKLEIK

SEQ ID NO: 2880 - protein, 356 aa, Artificial Sequence
  source: /note="Description of Artificial Sequence: Synthetic polypeptide"
DIQMTQSPSTLSASVGDRVTITCKAQLSVGYMHWYQQKPGKAPKLLIYDTSKLASGVPSRFSGSGSGTEFTLTISSLQPDDFATYYCFQGSGQDPYVKEAENLKKYFNAGHSDVADNGTLFLGILKNWKEESDRKIMQSQIVSFYFKLFKNFKDDQSIQKSVETIKEDMNVKFFNSNKKKRDDFEKLTNYSVTDLNVQRKAIHELIQVMAELSPAAKTGKRKRSQMLFRGRRASQYPFTFGGGTKLEIKRTVAAPSVFIFPPSDEQLKSGTASVVCLLNNFYPREAKVQWKVDNALQSGNSQESVTEQDSKDSTYSLSSTLTLSKADYEKHKVYACEVTHQGLSSPVTKSFNRGEC

SEQ ID NO: 2881 - protein, 187 aa, Artificial Sequence
  source: /note="Description of Artificial Sequence: Synthetic polypeptide"
DCNLLNVHLRRVTWQNLRHLSSMSNSFPVECLRENIAFELPQEFLQYTQPMKRDIKKAFYEMSLQAFNIFSQHTFKYWKERHLKQIQIGLDQQAEYLNQCLEEDKNENEDMKEMKENEMKPSEARVPQLSSLELRRYFHRIDNFLKEKKYSDCAWEIVRVEIRRCLYYFYKFTALFRRKSTSGMSVG

SEQ ID NO: 2882 - protein, 16 aa, Artificial Sequence
  source: /note="Description of Artificial Sequence: Synthetic peptide"
DIWWDDKKDYNPSLKS

SEQ ID NO: 2883 - protein, 10 aa, Artificial Sequence
  source: /note="Description of Artificial Sequence: Synthetic peptide"
SMITNWYFDV

SEQ ID NO: 2884 - protein, 189 aa, Artificial Sequence
  source: /note="Description of Artificial Sequence: Synthetic polypeptide"
GFSLLDCNLLNVHLRRVTWQNLRHLSSMSNSFPVECLRENIAFELPQEFLQYTQPMKRDIKKAFYEMSLQAFNIFSQHTFKYWKERHLKQIQIGLDQQAEYLNQCLEEDKNENEDMKEMKENEMKPSEARVPQLSSLELRRYFHRIDNFLKEKKYSDCAWEIVRVEIRRCLYYFYKFTALFRRKSTSGM

SEQ ID NO: 2885 - protein, 5 aa, Artificial Sequence
  source: /note="Description of Artificial Sequence: Synthetic peptide"
WWDDK

SEQ ID NO: 2886 - protein, 10 aa, Artificial Sequence
  source: /note="Description of Artificial Sequence: Synthetic peptide"
SMITNWYFDV

SEQ ID NO: 2887 - protein, 300 aa, Artificial Sequence
  source: /note="Description of Artificial Sequence: Synthetic polypeptide"
QVTLRESGPALVKPTQTLTLTCTFSGFSLLDCNLLNVHLRRVTWQNLRHLSSMSNSFPVECLRENIAFELPQEFLQYTQPMKRDIKKAFYEMSLQAFNIFSQHTFKYWKERHLKQIQIGLDQQAEYLNQCLEEDKNENEDMKEMKENEMKPSEARVPQLSSLELRRYFHRIDNFLKEKKYSDCAWEIVRVEIRRCLYYFYKFTALFRRKSTSGMSVGWIRQPPGKALEWLADIWWDDKKDYNPSLKSRLTISKDTSANQVVLKVTNMDPADTATYYCARSMITNWYFDVWGAGTTVTVSS

SEQ ID NO: 2888 - protein, 630 aa, Artificial Sequence
  source: /note="Description of Artificial Sequence: Synthetic polypeptide"
QVTLRESGPALVKPTQTLTLTCTFSGFSLLDCNLLNVHLRRVTWQNLRHLSSMSNSFPVECLRENIAFELPQEFLQYTQPMKRDIKKAFYEMSLQAFNIFSQHTFKYWKERHLKQIQIGLDQQAEYLNQCLEEDKNENEDMKEMKENEMKPSEARVPQLSSLELRRYFHRIDNFLKEKKYSDCAWEIVRVEIRRCLYYFYKFTALFRRKSTSGMSVGWIRQPPGKALEWLADIWWDDKKDYNPSLKSRLTISKDTSANQVVLKVTNMDPADTATYYCARSMITNWYFDVWGAGTTVTVSSASTKGPSVFPLAPSSKSTSGGTAALGCLVKDYFPEPVTVSWNSGALTSGVHTFPAVLQSSGLYSLSSVVTVPSSSLGTQTYICNVNHKPSNTKVDKRVEPKSCDKTHTCPPCPAPELLGGPSVFLFPPKPKDTLMISRTPEVTCVVVAVSHEDPEVKFNWYVDGVEVHNAKTKPREEQYNSTYRVVSVLTVLHQDWLNGKEYKCKVSNKALAAPIEKTISKAKGQPREPQVYTLPPSREEMTKNQVSLTCLVKGFYPSDIAVEWESNGQPENNYKTTPPVLDSDGSFFLYSKLTVDKSRWQQGNVFSCSVMHEALHNHYTQKSLSLSPGK

SEQ ID NO: 2889 - protein, 10 aa, Artificial Sequence
  source: /note="Description of Artificial Sequence: Synthetic peptide"
KAQLSVGYMH

SEQ ID NO: 2890 - protein, 7 aa, Artificial Sequence
  source: /note="Description of Artificial Sequence: Synthetic peptide"
DTSKLAS

SEQ ID NO: 2891 - protein, 9 aa, Artificial Sequence
  source: /note="Description of Artificial Sequence: Synthetic peptide"
FQGSGYPFT

SEQ ID NO: 2892 - protein, 6 aa, Artificial Sequence
  source: /note="Description of Artificial Sequence: Synthetic peptide"
QLSVGY

SEQ ID NO: 2893 - protein, 3 aa, Artificial Sequence
  source: /note="Description of Artificial Sequence: Synthetic peptide"
DTS

SEQ ID NO: 2894 - protein, 6 aa, Artificial Sequence
  source: /note="Description of Artificial Sequence: Synthetic peptide"
GSGYPF

SEQ ID NO: 2895 - protein, 106 aa, Artificial Sequence; identical to SEQ ID NO: 15
  source: /note="Description of Artificial Sequence: Synthetic polypeptide"

SEQ ID NO: 2896 - protein, 213 aa, Artificial Sequence; identical to SEQ ID NO: 16
  source: /note="Description of Artificial Sequence: Synthetic polypeptide"

SEQ ID NO: 2897 - protein, 7 aa, Artificial Sequence
  source: /note="Description of Artificial Sequence: Synthetic peptide"
TSGMSVG

SEQ ID NO: 2898 - protein, 196 aa, Artificial Sequence
  source: /note="Description of Artificial Sequence: Synthetic polypeptide"
DIWWDLDCNLLNVHLRRVTWQNLRHLSSMSNSFPVECLRENIAFELPQEFLQYTQPMKRDIKKAFYEMSLQAFNIFSQHTFKYWKERHLKQIQIGLDQQAEYLNQCLEEDKNENEDMKEMKENEMKPSEARVPQLSSLELRRYFHRIDNFLKEKKYSDCAWEIVRVEIRRCLYYFYKFTALFRRKDKKDYNPSLKS

SEQ ID NO: 2899 - protein, 10 aa, Artificial Sequence
  source: /note="Description of Artificial Sequence: Synthetic peptide"
SMITNWYFDV

SEQ ID NO: 2900 - protein, 9 aa, Artificial Sequence
  source: /note="Description of Artificial Sequence: Synthetic peptide"
GFSLSTSGM

SEQ ID NO: 2901 - protein, 185 aa, Artificial Sequence
  source: /note="Description of Artificial Sequence: Synthetic polypeptide"
WWDLDCNLLNVHLRRVTWQNLRHLSSMSNSFPVECLRENIAFELPQEFLQYTQPMKRDIKKAFYEMSLQAFNIFSQHTFKYWKERHLKQIQIGLDQQAEYLNQCLEEDKNENEDMKEMKENEMKPSEARVPQLSSLELRRYFHRIDNFLKEKKYSDCAWEIVRVEIRRCLYYFYKFTALFRRKDK

SEQ ID NO: 2902 - protein, 10 aa, Artificial Sequence
  source: /note="Description of Artificial Sequence: Synthetic peptide"
SMITNWYFDV

SEQ ID NO: 2903 - protein, 300 aa, Artificial Sequence
  source: /note="Description of Artificial Sequence: Synthetic polypeptide"
QVTLRESGPALVKPTQTLTLTCTFSGFSLSTSGMSVGWIRQPPGKALEWLADIWWDLDCNLLNVHLRRVTWQNLRHLSSMSNSFPVECLRENIAFELPQEFLQYTQPMKRDIKKAFYEMSLQAFNIFSQHTFKYWKERHLKQIQIGLDQQAEYLNQCLEEDKNENEDMKEMKENEMKPSEARVPQLSSLELRRYFHRIDNFLKEKKYSDCAWEIVRVEIRRCLYYFYKFTALFRRKDKKDYNPSLKSRLTISKDTSKNQVVLKVTNMDPADTATYYCARSMITNWYFDVWGAGTTVTVSS

SEQ ID NO: 2904 - protein, 630 aa, Artificial Sequence
  source: /note="Description of Artificial Sequence: Synthetic polypeptide"
QVTLRESGPALVKPTQTLTLTCTFSGFSLSTSGMSVGWIRQPPGKALEWLADIWWDLDCNLLNVHLRRVTWQNLRHLSSMSNSFPVECLRENIAFELPQEFLQYTQPMKRDIKKAFYEMSLQAFNIFSQHTFKYWKERHLKQIQIGLDQQAEYLNQCLEEDKNENEDMKEMKENEMKPSEARVPQLSSLELRRYFHRIDNFLKEKKYSDCAWEIVRVEIRRCLYYFYKFTALFRRKDKKDYNPSLKSRLTISKDTSKNQVVLKVTNMDPADTATYYCARSMITNWYFDVWGAGTTVTVSSASTKGPSVFPLAPSSKSTSGGTAALGCLVKDYFPEPVTVSWNSGALTSGVHTFPAVLQSSGLYSLSSVVTVPSSSLGTQTYICNVNHKPSNTKVDKRVEPKSCDKTHTCPPCPAPELLGGPSVFLFPPKPKDTLMISRTPEVTCVVVAVSHEDPEVKFNWYVDGVEVHNAKTKPREEQYNSTYRVVSVLTVLHQDWLNGKEYKCKVSNKALAAPIEKTISKAKGQPREPQVYTLPPSREEMTKNQVSLTCLVKGFYPSDIAVEWESNGQPENNYKTTPPVLDSDGSFFLYSKLTVDKSRWQQGNVFSCSVMHEALHNHYTQKSLSLSPGK

SEQ ID NO: 2905 - protein, 10 aa, Artificial Sequence
  source: /note="Description of Artificial Sequence: Synthetic peptide"
KAQLSVGYMH

SEQ ID NO: 2906 - protein, 7 aa, Artificial Sequence
  source: /note="Description of Artificial Sequence: Synthetic peptide"
DTSKLAS

SEQ ID NO: 2907 - protein, 9 aa, Artificial Sequence
  source: /note="Description of Artificial Sequence: Synthetic peptide"
FQGSGYPFT

SEQ ID NO: 2908 - protein, 6 aa, Artificial Sequence
  source: /note="Description of Artificial Sequence: Synthetic peptide"
QLSVGY

SEQ ID NO: 2909 - protein, 3 aa, Artificial Sequence
  source: /note="Description of Artificial Sequence: Synthetic peptide"
DTS

SEQ ID NO: 2910 - protein, 6 aa, Artificial Sequence
  source: /note="Description of Artificial Sequence: Synthetic peptide"
GSGYPF

SEQ ID NO: 2911 - protein, 106 aa, Artificial Sequence; identical to SEQ ID NO: 15
  source: /note="Description of Artificial Sequence: Synthetic polypeptide"

SEQ ID NO: 2912 - protein, 213 aa, Artificial Sequence; identical to SEQ ID NO: 16
  source: /note="Description of Artificial Sequence: Synthetic polypeptide"

SEQ ID NO: 2913 - protein, 7 aa, Artificial Sequence
  source: /note="Description of Artificial Sequence: Synthetic peptide"
TSGMSVG

SEQ ID NO: 2914 - protein, 16 aa, Artificial Sequence
  source: /note="Description of Artificial Sequence: Synthetic peptide"
DIWWDDKKDYNPSLKS

SEQ ID NO: 2915 - protein, 190 aa, Artificial Sequence
  source: /note="Description of Artificial Sequence: Synthetic polypeptide"
SMITLDCNLLNVHLRRVTWQNLRHLSSMSNSFPVECLRENIAFELPQEFLQYTQPMKRDIKKAFYEMSLQAFNIFSQHTFKYWKERHLKQIQIGLDQQAEYLNQCLEEDKNENEDMKEMKENEMKPSEARVPQLSSLELRRYFHRIDNFLKEKKYSDCAWEIVRVEIRRCLYYFYKFTALFRRKNWYFDV

SEQ ID NO: 2916 - protein, 9 aa, Artificial Sequence
  source: /note="Description of Artificial Sequence: Synthetic peptide"
GFSLSTSGM

SEQ ID NO: 2917 - protein, 5 aa, Artificial Sequence
  source: /note="Description of Artificial Sequence: Synthetic peptide"
WWDDK

SEQ ID NO: 2918 - protein, 190 aa, Artificial Sequence; identical to SEQ ID NO: 2915
  source: /note="Description of Artificial Sequence: Synthetic polypeptide"

SEQ ID NO: 2919 - protein, 300 aa, Artificial Sequence
  source: /note="Description of Artificial Sequence: Synthetic polypeptide"
QVTLRESGPALVKPTQTLTLTCTFSGFSLSTSGMSVGWIRQPPGKALEWLADIWWDDKKDYNPSLKSRLTISKDTSKNQVVLKVTNMDPADTATYYCARSMITLDCNLLNVHLRRVTWQNLRHLSSMSNSFPVECLRENIAFELPQEFLQYTQPMKRDIKKAFYEMSLQAFNIFSQHTFKYWKERHLKQIQIGLDQQAEYLNQCLEEDKNENEDMKEMKENEMKPSEARVPQLSSLELRRYFHRIDNFLKEKKYSDCAWEIVRVEIRRCLYYFYKFTALFRRKNWYFDVWGAGTTVTVSS

SEQ ID NO: 2920 - protein, 630 aa, Artificial Sequence
  source: /note="Description of Artificial Sequence: Synthetic polypeptide"
QVTLRESGPALVKPTQTLTLTCTFSGFSLSTSGMSVGWIRQPPGKALEWLADIWWDDKKDYNPSLKSRLTISKDTSKNQVVLKVTNMDPADTATYYCARSMITLDCNLLNVHLRRVTWQNLRHLSSMSNSFPVECLRENIAFELPQEFLQYTQPMKRDIKKAFYEMSLQAFNIFSQHTFKYWKERHLKQIQIGLDQQAEYLNQCLEEDKNENEDMKEMKENEMKPSEARVPQLSSLELRRYFHRIDNFLKEKKYSDCAWEIVRVEIRRCLYYFYKFTALFRRKNWYFDVWGAGTTVTVSSASTKGPSVFPLAPSSKSTSGGTAALGCLVKDYFPEPVTVSWNSGALTSGVHTFPAVLQSSGLYSLSSVVTVPSSSLGTQTYICNVNHKPSNTKVDKRVEPKSCDKTHTCPPCPAPELLGGPSVFLFPPKPKDTLMISRTPEVTCVVVAVSHEDPEVKFNWYVDGVEVHNAKTKPREEQYNSTYRVVSVLTVLHQDWLNGKEYKCKVSNKALAAPIEKTISKAKGQPREPQVYTLPPSREEMTKNQVSLTCLVKGFYPSDIAVEWESNGQPENNYKTTPPVLDSDGSFFLYSKLTVDKSRWQQGNVFSCSVMHEALHNHYTQKSLSLSPGK

SEQ ID NO: 2921 - protein, 10 aa, Artificial Sequence
  source: /note="Description of Artificial Sequence: Synthetic peptide"
KAQLSVGYMH

SEQ ID NO: 2922 - protein, 7 aa, Artificial Sequence
  source: /note="Description of Artificial Sequence: Synthetic peptide"
DTSKLAS

SEQ ID NO: 2923 - protein, 9 aa, Artificial Sequence
  source: /note="Description of Artificial Sequence: Synthetic peptide"
FQGSGYPFT

SEQ ID NO: 2924 - protein, 6 aa, Artificial Sequence
  source: /note="Description of Artificial Sequence: Synthetic peptide"
QLSVGY

SEQ ID NO: 2925 - protein, 3 aa, Artificial Sequence
  source: /note="Description of Artificial Sequence: Synthetic peptide"
DTS

SEQ ID NO: 2926 - protein, 6 aa, Artificial Sequence
  source: /note="Description of Artificial Sequence: Synthetic peptide"
GSGYPF

SEQ ID NO: 2927 - protein, 106 aa, Artificial Sequence; identical to SEQ ID NO: 15
  source: /note="Description of Artificial Sequence: Synthetic polypeptide"

SEQ ID NO: 2928 - protein, 213 aa, Artificial Sequence; identical to SEQ ID NO: 16
  source: /note="Description of Artificial Sequence: Synthetic polypeptide"

SEQ ID NO: 2929 - protein, 7 aa, Artificial Sequence
  source: /note="Description of Artificial Sequence: Synthetic peptide"
TSGMSVG

SEQ ID NO: 2930 - protein, 15 aa, Artificial Sequence
  source: /note="Description of Artificial Sequence: Synthetic peptide"
DIWWDDKKDYNPSLK

SEQ ID NO: 2931 - protein, 10 aa, Artificial Sequence
  source: /note="Description of Artificial Sequence: Synthetic peptide"
SMITNWYFDV

SEQ ID NO: 2932 - protein, 9 aa, Artificial Sequence
  source: /note="Description of Artificial Sequence: Synthetic peptide"
GFSLSTSGM

SEQ ID NO: 2933 - protein, 5 aa, Artificial Sequence
  source: /note="Description of Artificial Sequence: Synthetic peptide"
WWDDK

SEQ ID NO: 2934 - protein, 10 aa, Artificial Sequence
  source: /note="Description of Artificial Sequence: Synthetic peptide"
SMITNWYFDV

SEQ ID NO: 2935 - protein, 120 aa, Artificial Sequence; identical to SEQ ID NO: 55
  source: /note="Description of Artificial Sequence: Synthetic polypeptide"

SEQ ID NO: 2936 - protein, 450 aa, Artificial Sequence; identical to SEQ ID NO: 56
  source: /note="Description of Artificial Sequence: Synthetic polypeptide"

SEQ ID NO: 2937 - protein, 190 aa, Artificial Sequence
  source: /note="Description of Artificial Sequence: Synthetic polypeptide"
KAQLSLDCNLLNVHLRRVTWQNLRHLSSMSNSFPVECLRENIAFELPQEFLQYTQPMKRDIKKAFYEMSLQAFNIFSQHTFKYWKERHLKQIQIGLDQQAEYLNQCLEEDKNENEDMKEMKENEMKPSEARVPQLSSLELRRYFHRIDNFLKEKKYSDCAWEIVRVEIRRCLYYFYKFTALFRRKVGYMH

SEQ ID NO: 2938 - protein, 7 aa, Artificial Sequence
  source: /note="Description of Artificial Sequence: Synthetic peptide"
DTSKLAS

SEQ ID NO: 2939 - protein, 9 aa, Artificial Sequence
  source: /note="Description of Artificial Sequence: Synthetic peptide"
FQGSGYPFT

SEQ ID NO: 2940 - protein, 186 aa, Artificial Sequence
  source: /note="Description of Artificial Sequence: Synthetic polypeptide"
QLSLDCNLLNVHLRRVTWQNLRHLSSMSNSFPVECLRENIAFELPQEFLQYTQPMKRDIKKAFYEMSLQAFNIFSQHTFKYWKERHLKQIQIGLDQQAEYLNQCLEEDKNENEDMKEMKENEMKPSEARVPQLSSLELRRYFHRIDNFLKEKKYSDCAWEIVRVEIRRCLYYFYKFTALFRRKVGY

SEQ ID NO: 2941 - protein, 3 aa, Artificial Sequence
  source: /note="Description of Artificial Sequence: Synthetic peptide"
DTS

SEQ ID NO: 2942 - protein, 6 aa, Artificial Sequence
  source: /note="Description of Artificial Sequence: Synthetic peptide"
GSGYPF

SEQ ID NO: 2943 - protein, 286 aa, Artificial Sequence
  source: /note="Description of Artificial Sequence: Synthetic polypeptide"
DIQMTQSPSTLSASVGDRVTITCKAQLSLDCNLLNVHLRRVTWQNLRHLSSMSNSFPVECLRENIAFELPQEFLQYTQPMKRDIKKAFYEMSLQAFNIFSQHTFKYWKERHLKQIQIGLDQQAEYLNQCLEEDKNENEDMKEMKENEMKPSEARVPQLSSLELRRYFHRIDNFLKEKKYSDCAWEIVRVEIRRCLYYFYKFTALFRRKVGYMHWYQQKPGKAPKLLIYDTSKLASGVPSRFSGSGSGTEFTLTISSLQPDDFATYYCFQGSGYPFTFGGGTKLEIK

SEQ ID NO: 2944 - protein, 393 aa, Artificial Sequence
  source: /note="Description of Artificial Sequence: Synthetic polypeptide"
DIQMTQSPSTLSASVGDRVTITCKAQLSLDCNLLNVHLRRVTWQNLRHLSSMSNSFPVECLRENIAFELPQEFLQYTQPMKRDIKKAFYEMSLQAFNIFSQHTFKYWKERHLKQIQIGLDQQAEYLNQCLEEDKNENEDMKEMKENEMKPSEARVPQLSSLELRRYFHRIDNFLKEKKYSDCAWEIVRVEIRRCLYYFYKFTALFRRKVGYMHWYQQKPGKAPKLLIYDTSKLASGVPSRFSGSGSGTEFTLTISSLQPDDFATYYCFQGSGYPFTFGGGTKLEIKRTVAAPSVFIFPPSDEQLKSGTASVVCLLNNFYPREAKVQWKVDNALQSGNSQESVTEQDSKDSTYSLSSTLTLSKADYEKHKVYACEVTHQGLSSPVTKSFNRGEC

SEQ ID NO: 2945 - protein, 7 aa, Artificial Sequence
  source: /note="Description of Artificial Sequence: Synthetic peptide"
TSGMSVG

SEQ ID NO: 2946 - protein, 15 aa, Artificial Sequence
  source: /note="Description of Artificial Sequence: Synthetic peptide"
DIWWDDKKDYNPSLK

SEQ ID NO: 2947 - protein, 10 aa, Artificial Sequence
  source: /note="Description of Artificial Sequence: Synthetic peptide"
SMITNWYFDV

SEQ ID NO: 2948 - protein, 9 aa, Artificial Sequence
  source: /note="Description of Artificial Sequence: Synthetic peptide"
GFSLSTSGM

SEQ ID NO: 2949 - protein, 5 aa, Artificial Sequence
  source: /note="Description of Artificial Sequence: Synthetic peptide"
WWDDK

SEQ ID NO: 2950 - protein, 10 aa, Artificial Sequence
  source: /note="Description of Artificial Sequence: Synthetic peptide"
SMITNWYFDV

SEQ ID NO: 2951 - protein, 120 aa, Artificial Sequence; identical to SEQ ID NO: 55
  source: /note="Description of Artificial Sequence: Synthetic polypeptide"

SEQ ID NO: 2952 - protein, 450 aa, Artificial Sequence; identical to SEQ ID NO: 56
  source: /note="Description of Artificial Sequence: Synthetic polypeptide"

SEQ ID NO: 2953 - protein, 10 aa, Artificial Sequence
  source: /note="Description of Artificial Sequence: Synthetic peptide"
KAQLSVGYMH

SEQ ID NO: 2954 - protein, 187 aa, Artificial Sequence
  source: /note="Description of Artificial Sequence: Synthetic polypeptide"
DTLDCNLLNVHLRRVTWQNLRHLSSMSNSFPVECLRENIAFELPQEFLQYTQPMKRDIKKAFYEMSLQAFNIFSQHTFKYWKERHLKQIQIGLDQQAEYLNQCLEEDKNENEDMKEMKENEMKPSEARVPQLSSLELRRYFHRIDNFLKEKKYSDCAWEIVRVEIRRCLYYFYKFTALFRRKSKLAS

SEQ ID NO: 2955 - protein, 9 aa, Artificial Sequence
  source: /note="Description of Artificial Sequence: Synthetic peptide"
FQGSGYPFT

SEQ ID NO: 2956 - protein, 6 aa, Artificial Sequence
  source: /note="Description of Artificial Sequence: Synthetic peptide"
QLSVGY

SEQ ID NO: 2957 - protein, 183 aa, Artificial Sequence
  source: /note="Description of Artificial Sequence: Synthetic polypeptide"
DTLDCNLLNVHLRRVTWQNLRHLSSMSNSFPVECLRENIAFELPQEFLQYTQPMKRDIKKAFYEMSLQAFNIFSQHTFKYWKERHLKQIQIGLDQQAEYLNQCLEEDKNENEDMKEMKENEMKPSEARVPQLSSLELRRYFHRIDNFLKEKKYSDCAWEIVRVEIRRCLYYFYKFTALFRRKS

SEQ ID NO: 2958 - protein, 6 aa, Artificial Sequence
  source: /note="Description of Artificial Sequence: Synthetic peptide"
GSGYPF

SEQ ID NO: 2959 - protein, 286 aa, Artificial Sequence
  source: /note="Description of Artificial Sequence: Synthetic polypeptide"
DIQMTQSPSTLSASVGDRVTITCKAQLSVGYMHWYQQKPGKAPKLLIYDTLDCNLLNVHLRRVTWQNLRHLSSMSNSFPVECLRENIAFELPQEFLQYTQPMKRDIKKAFYEMSLQAFNIFSQHTFKYWKERHLKQIQIGLDQQAEYLNQCLEEDKNENEDMKEMKENEMKPSEARVPQLSSLELRRYFHRIDNFLKEKKYSDCAWEIVRVEIRRCLYYFYKFTALFRRKSKLASGVPSRFSGSGSGTEFTLTISSLQPDDFATYYCFQGSGYPFTFGGGTKLEIK

SEQ ID NO: 2960 - protein, 393 aa, Artificial Sequence
  source: /note="Description of Artificial Sequence: Synthetic polypeptide"
DIQMTQSPSTLSASVGDRVTITCKAQLSVGYMHWYQQKPGKAPKLLIYDTLDCNLLNVHLRRVTWQNLRHLSSMSNSFPVECLRENIAFELPQEFLQYTQPMKRDIKKAFYEMSLQAFNIFSQHTFKYWKERHLKQIQIGLDQQAEYLNQCLEEDKNENEDMKEMKENEMKPSEARVPQLSSLELRRYFHRIDNFLKEKKYSDCAWEIVRVEIRRCLYYFYKFTALFRRKSKLASGVPSRFSGSGSGTEFTLTISSLQPDDFATYYCFQGSGYPFTFGGGTKLEIKRTVAAPSVFIFPPSDEQLKSGTASVVCLLNNFYPREAKVQWKVDNALQSGNSQESVTEQDSKDSTYSLSSTLTLSKADYEKHKVYACEVTHQGLSSPVTKSFNRGEC

SEQ ID NO: 2961 - protein, 7 aa, Artificial Sequence
  source: /note="Description of Artificial Sequence: Synthetic peptide"
TSGMSVG

SEQ ID NO: 2962 - protein, 15 aa, Artificial Sequence
  source: /note="Description of Artificial Sequence: Synthetic peptide"
DIWWDDKKDYNPSLK

SEQ ID NO: 2963 - protein, 10 aa, Artificial Sequence
  source: /note="Description of Artificial Sequence: Synthetic peptide"
SMITNWYFDV

SEQ ID NO: 2964 - protein, 9 aa, Artificial Sequence
  source: /note="Description of Artificial Sequence: Synthetic peptide"
GFSLSTSGM

SEQ ID NO: 2965 - protein, 5 aa, Artificial Sequence
  source: /note="Description of Artificial Sequence: Synthetic peptide"
WWDDK

SEQ ID NO: 2966 - protein, 10 aa, Artificial Sequence
  source: /note="Description of Artificial Sequence: Synthetic peptide"
SMITNWYFDV

SEQ ID NO: 2967 - protein, 120 aa, Artificial Sequence; identical to SEQ ID NO: 55
  source: /note="Description of Artificial Sequence: Synthetic polypeptide"

SEQ ID NO: 2968 - protein, 450 aa, Artificial Sequence; identical to SEQ ID NO: 56
  source: /note="Description of Artificial Sequence: Synthetic polypeptide"

SEQ ID NO: 2969 - protein, 10 aa, Artificial Sequence
  source: /note="Description of Artificial Sequence: Synthetic peptide"
KAQLSVGYMH

SEQ ID NO: 2970 - protein, 7 aa, Artificial Sequence
  source: /note="Description of Artificial Sequence: Synthetic peptide"
DTSKLAS

SEQ ID NO: 2971 - protein, 189 aa, Artificial Sequence
  source: /note="Description of Artificial Sequence: Synthetic polypeptide"
FQGSGLDCNLLNVHLRRVTWQNLRHLSSMSNSFPVECLRENIAFELPQEFLQYTQPMKRDIKKAFYEMSLQAFNIFSQHTFKYWKERHLKQIQIGLDQQAEYLNQCLEEDKNENEDMKEMKENEMKPSEARVPQLSSLELRRYFHRIDNFLKEKKYSDCAWEIVRVEIRRCLYYFYKFTALFRRKYPFT

SEQ ID NO: 2972 - protein, 6 aa, Artificial Sequence
  source: /note="Description of Artificial Sequence: Synthetic peptide"
QLSVGY

SEQ ID NO: 2973 - protein, 3 aa, Artificial Sequence
  source: /note="Description of Artificial Sequence: Synthetic peptide"
DTS

SEQ ID NO: 2974 - protein, 186 aa, Artificial Sequence
  source: /note="Description of Artificial Sequence: Synthetic polypeptide"
GSGLDCNLLNVHLRRVTWQNLRHLSSMSNSFPVECLRENIAFELPQEFLQYTQPMKRDIKKAFYEMSLQAFNIFSQHTFKYWKERHLKQIQIGLDQQAEYLNQCLEEDKNENEDMKEMKENEMKPSEARVPQLSSLELRRYFHRIDNFLKEKKYSDCAWEIVRVEIRRCLYYFYKFTALFRRKYPF

SEQ ID NO: 2975 - protein, 286 aa, Artificial Sequence
  source: /note="Description of Artificial Sequence: Synthetic polypeptide"
DIQMTQSPSTLSASVGDRVTITCKAQLSVGYMHWYQQKPGKAPKLLIYDTSKLASGVPSRFSGSGSGTEFTLTISSLQPDDFATYYCFQGSGLDCNLLNVHLRRVTWQNLRHLSSMSNSFPVECLRENIAFELPQEFLQYTQPMKRDIKKAFYEMSLQAFNIFSQHTFKYWKERHLKQIQIGLDQQAEYLNQCLEEDKNENEDMKEMKENEMKPSEARVPQLSSLELRRYFHRIDNFLKEKKYSDCAWEIVRVEIRRCLYYFYKFTALFRRKYPFTFGGGTKLEIK

SEQ ID NO: 2976 - protein, 393 aa, Artificial Sequence
  source: /note="Description of Artificial Sequence: Synthetic polypeptide"
DIQMTQSPSTLSASVGDRVTITCKAQLSVGYMHWYQQKPGKAPKLLIYDTSKLASGVPSRFSGSGSGTEFTLTISSLQPDDFATYYCFQGSGLDCNLLNVHLRRVTWQNLRHLSSMSNSFPVECLRENIAFELPQEFLQYTQPMKRDIKKAFYEMSLQAFNIFSQHTFKYWKERHLKQIQIGLDQQAEYLNQCLEEDKNENEDMKEMKENEMKPSEARVPQLSSLELRRYFHRIDNFLKEKKYSDCAWEIVRVEIRRCLYYFYKFTALFRRKYPFTFGGGTKLEIKRTVAAPSVFIFPPSDEQLKSGTASVVCLLNNFYPREAKVQWKVDNALQSGNSQESVTEQDSKDSTYSLSSTLTLSKADYEKHKVYACEVTHQGLSSPVTKSFNRGEC

SEQ ID NO: 2977 - protein, 179 aa, Artificial Sequence
  source: /note="Description of Artificial Sequence: Synthetic polypeptide"
DLPQNHGLLSRNTLVLLHQMRRISPFLCLKDRRDFRFPQEMVKGSQLQKAHVMSVLHEMLQQIFSLFHTERSSAAWNMTLLDQLHTGLHQQLQHLETCLLQVVGEGESAGAISSPALTLRRYFQGIRVYLKEKKYSDCAWEVVRMEIMKSLFLSTNMQERLRSKDRDLGSSSTSGMSVG

SEQ ID NO: 2978 - protein, 16 aa, Artificial Sequence
  source: /note="Description of Artificial Sequence: Synthetic peptide"
DIWWDDKKDYNPSLKS

SEQ ID NO: 2979 - protein, 10 aa, Artificial Sequence
  source: /note="Description of Artificial Sequence: Synthetic peptide"
SMITNWYFDV

SEQ ID NO: 2980 - protein, 181 aa, Artificial Sequence
  source: /note="Description of Artificial Sequence: Synthetic polypeptide"
GFSLCDLPQNHGLLSRNTLVLLHQMRRISPFLCLKDRRDFRFPQEMVKGSQLQKAHVMSVLHEMLQQIFSLFHTERSSAAWNMTLLDQLHTGLHQQLQHLETCLLQVVGEGESAGAISSPALTLRRYFQGIRVYLKEKKYSDCAWEVVRMEIMKSLFLSTNMQERLRSKDRDLGSSSTSGM

SEQ ID NO: 2981 - protein, 5 aa, Artificial Sequence
  source: /note="Description of Artificial Sequence: Synthetic peptide"
WWDDK

SEQ ID NO: 2982 - protein, 10 aa, Artificial Sequence
  source: /note="Description of Artificial Sequence: Synthetic peptide"
SMITNWYFDV

SEQ ID NO: 2983 - protein, 292 aa, Artificial Sequence
  source: /note="Description of Artificial Sequence: Synthetic polypeptide"
QVTLRESGPALVKPTQTLTLTCTFSGFSLCDLPQNHGLLSRNTLVLLHQMRRISPFLCLKDRRDFRFPQEMVKGSQLQKAHVMSVLHEMLQQIFSLFHTERSSAAWNMTLLDQLHTGLHQQLQHLETCLLQVVGEGESAGAISSPALTLRRYFQGIRVYLKEKKYSDCAWEVVRMEIMKSLFLSTNMQERLRSKDRDLGSSSTSGMSVGWIRQPPGKALEWLADIWWDDKKDYNPSLKSRLTISKDTSKNQVVLKVTNMDPADTATYYCARSMITNWYFDVWGAGTTVTVSS

SEQ ID NO: 2984 - protein, 622 aa, Artificial Sequence
  source: /note="Description of Artificial Sequence: Synthetic polypeptide"
QVTLRESGPALVKPTQTLTLTCTFSGFSLCDLPQNHGLLSRNTLVLLHQMRRISPFLCLKDRRDFRFPQEMVKGSQLQKAHVMSVLHEMLQQIFSLFHTERSSAAWNMTLLDQLHTGLHQQLQHLETCLLQVVGEGESAGAISSPALTLRRYFQGIRVYLKEKKYSDCAWEVVRMEIMKSLFLSTNMQERLRSKDRDLGSSSTSGMSVGWIRQPPGKALEWLADIWWDDKKDYNPSLKSRLTISKDTSKNQVVLKVTNMDPADTATYYCARSMITNWYFDVWGAGTTVTVSSASTKGPSVFPLAPSSKSTSGGTAALGCLVKDYFPEPVTVSWNSGALTSGVHTFPAVLQSSGLYSLSSVVTVPSSSLGTQTYICNVNHKPSNTKVDKRVEPKSCDKTHTCPPCPAPELLGGPSVFLFPPKPKDTLMISRTPEVTCVVVAVSHEDPEVKFNWYVDGVEVHNAKTKPREEQYNSTYRVVSVLTVLHQDWLNGKEYKCKVSNKALAAPIEKTISKAKGQPREPQVYTLPPSREEMTKNQVSLTCLVKGFYPSDIAVEWESNGQPENNYKTTPPVLDSDGSFFLYSKLTVDKSRWQQGNVFSCSVMHEALHNHYTQKSLSLSPGK

SEQ ID NO: 2985 - protein, 10 aa, Artificial Sequence
  source: /note="Description of Artificial Sequence: Synthetic peptide"
KAQLSVGYMH

SEQ ID NO: 2986 - protein, 7 aa, Artificial Sequence
  source: /note="Description of Artificial Sequence: Synthetic peptide"
DTSKLAS

SEQ ID NO: 2987 - protein, 9 aa, Artificial Sequence
  source: /note="Description of Artificial Sequence: Synthetic peptide"
FQGSGYPFT

SEQ ID NO: 2988 - protein, 6 aa, Artificial Sequence
  source: /note="Description of Artificial Sequence: Synthetic peptide"
QLSVGY

SEQ ID NO: 2989 - protein, 3 aa, Artificial Sequence
  source: /note="Description of Artificial Sequence: Synthetic peptide"
DTS

SEQ ID NO: 2990 - protein, 6 aa, Artificial Sequence
  source: /note="Description of Artificial Sequence: Synthetic peptide"
GSGYPF

SEQ ID NO: 2991 - protein, 106 aa, Artificial Sequence; identical to SEQ ID NO: 15
  source: /note="Description of Artificial Sequence: Synthetic polypeptide"

SEQ ID NO: 2992 - protein, 213 aa, Artificial Sequence; identical to SEQ ID NO: 16
  source: /note="Description of Artificial Sequence: Synthetic polypeptide"

SEQ ID NO: 2993 - protein, 7 aa, Artificial Sequence
  source: /note="Description of Artificial Sequence: Synthetic peptide"
TSGMSVG

SEQ ID NO: 2994 - protein, 188 aa, Artificial Sequence
  source: /note="Description of Artificial Sequence: Synthetic polypeptide"
DIWWDCDLPQNHGLLSRNTLVLLHQMRRISPFLCLKDRRDFRFPQEMVKGSQLQKAHVMSVLHEMLQQIFSLFHTERSSAAWNMTLLDQLHTGLHQQLQHLETCLLQVVGEGESAGAISSPALTLRRYFQGIRVYLKEKKYSDCAWEVVRMEIMKSLFLSTNMQERLRSKDRDLGSSDKKDYNPSLKS

SEQ ID NO: 2995 - protein, 10 aa, Artificial Sequence
  source: /note="Description of Artificial Sequence: Synthetic peptide"
SMITNWYFDV

SEQ ID NO: 2996 - protein, 9 aa, Artificial Sequence
  source: /note="Description of Artificial Sequence: Synthetic peptide"
GFSLSTSGM

SEQ ID NO: 2997 - protein, 177 aa, Artificial Sequence
  source: /note="Description of Artificial Sequence: Synthetic polypeptide"
WWDCDLPQNHGLLSRNTLVLLHQMRRISPFLCLKDRRDFRFPQEMVKGSQLQKAHVMSVLHEMLQQIFSLFHTERSSAAWNMTLLDQLHTGLHQQLQHLETCLLQVVGEGESAGAISSPALTLRRYFQGIRVYLKEKKYSDCAWEVVRMEIMKSLFLSTNMQERLRSKDRDLGSSDK

SEQ ID NO: 2998 - protein, 10 aa, Artificial Sequence
  source: /note="Description of Artificial Sequence: Synthetic peptide"
SMITNWYFDV

SEQ ID NO: 2999 - protein, 292 aa, Artificial Sequence
  source: /note="Description of Artificial Sequence: Synthetic polypeptide"
QVTLRESGPALVKPTQTLTLTCTFSGFSLSTSGMSVGWIRQPPGKALEWLADIWWDCDLPQNHGLLSRNTLVLLHQMRRISPFLCLKDRRDFRFPQEMVKGSQLQKAHVMSVLHEMLQQIFSLFHTERSSAAWNMTLLDQLHTGLHQQLQHLETCLLQVVGEGESAGAISSPALTLRRYFQGIRVYLKEKKYSDCAWEVVRMEIMKSLFLSTNMQERLRSKDRDLGSSDKKDYNPSLKSRLTISKDTSANQVVLKVTNMDPADTATYYCARSMITNWYFDVWGAGTTVTVSS

SEQ ID NO: 3000 - protein, 622 aa, Artificial Sequence
  source: /note="Description of Artificial Sequence: Synthetic polypeptide"
QVTLRESGPALVKPTQTLTLTCTFSGFSLSTSGMSVGWIRQPPGKALEWLADIWWDCDLPQNHGLLSRNTLVLLHQMRRISPFLCLKDRRDFRFPQEMVKGSQLQKAHVMSVLHEMLQQIFSLFHTERSSAAWNMTLLDQLHTGLHQQLQHLETCLLQVVGEGESAGAISSPALTLRRYFQGIRVYLKEKKYSDCAWEVVRMEIMKSLFLSTNMQERLRSKDRDLGSSDKKDYNPSLKSRLTISKDTSANQVVLKVTNMDPADTATYYCARSMITNWYFDVWGAGTTVTVSSASTKGPSVFPLAPSSKSTSGGTAALGCLVKDYFPEPVTVSWNSGALTSGVHTFPAVLQSSGLYSLSSVVTVPSSSLGTQTYICNVNHKPSNTKVDKRVEPKSCDKTHTCPPCPAPELLGGPSVFLFPPKPKDTLMISRTPEVTCVVVAVSHEDPEVKFNWYVDGVEVHNAKTKPREEQYNSTYRVVSVLTVLHQDWLNGKEYKCKVSNKALAAPIEKTISKAKGQPREPQVYTLPPSREEMTKNQVSLTCLVKGFYPSDIAVEWESNGQPENNYKTTPPVLDSDGSFFLYSKLTVDKSRWQQGNVFSCSVMHEALHNHYTQKSLSLSPGK

SEQ ID NO: 3001 - protein, 10 aa, Artificial Sequence
  source: /note="Description of Artificial Sequence: Synthetic peptide"
KAQLSVGYMH

SEQ ID NO: 3002 - protein, 7 aa, Artificial Sequence
  source: /note="Description of Artificial Sequence: Synthetic peptide"
DTSKLAS

SEQ ID NO: 3003 - protein, 9 aa, Artificial Sequence
  source: /note="Description of Artificial Sequence: Synthetic peptide"
FQGSGYPFT

SEQ ID NO: 3004 - protein, 6 aa, Artificial Sequence
  source: /note="Description of Artificial Sequence: Synthetic peptide"
QLSVGY

SEQ ID NO: 3005 - protein, 3 aa, Artificial Sequence
  source: /note="Description of Artificial Sequence: Synthetic peptide"
DTS

SEQ ID NO: 3006 - protein, 6 aa, Artificial Sequence
  source: /note="Description of Artificial Sequence: Synthetic peptide"
GSGYPF

SEQ ID NO: 3007 - protein, 106 aa, Artificial Sequence; identical to SEQ ID NO: 15
  source: /note="Description of Artificial Sequence: Synthetic polypeptide"

SEQ ID NO: 3008 - protein, 213 aa, Artificial Sequence; identical to SEQ ID NO: 16
  source: /note="Description of Artificial Sequence: Synthetic polypeptide"

SEQ ID NO: 3009 - protein, 7 aa, Artificial Sequence
  source: /note="Description of Artificial Sequence: Synthetic peptide"
TSGMSVG

SEQ ID NO: 3010 - protein, 16 aa, Artificial Sequence
  source: /note="Description of Artificial Sequence: Synthetic peptide"
DIWWDDKKDYNPSLKS

SEQ ID NO: 3011 - protein, 182 aa, Artificial Sequence
  source: /note="Description of Artificial Sequence: Synthetic polypeptide"
SMITCDLPQNHGLLSRNTLVLLHQMRRISPFLCLKDRRDFRFPQEMVKGSQLQKAHVMSVLHEMLQQIFSLFHTERSSAAWNMTLLDQLHTGLHQQLQHLETCLLQVVGEGESAGAISSPALTLRRYFQGIRVYLKEKKYSDCAWEVVRMEIMKSLFLSTNMQERLRSKDRDLGSSNWYFDV

SEQ ID NO: 3012 - protein, 9 aa, Artificial Sequence
  source: /note="Description of Artificial Sequence: Synthetic peptide"
GFSLSTSGM

SEQ ID NO: 3013 - protein, 5 aa, Artificial Sequence
  source: /note="Description of Artificial Sequence: Synthetic peptide"
WWDDK

SEQ ID NO: 3014 - protein, 182 aa, Artificial Sequence; identical to SEQ ID NO: 3011
  source: /note="Description of Artificial Sequence: Synthetic polypeptide"

SEQ ID NO: 3015 - protein, 292 aa, Artificial Sequence
  source: /note="Description of Artificial Sequence: Synthetic polypeptide"
QVTLRESGPALVKPTQTLTLTCTFSGFSLSTSGMSVGWIRQPPGKALEWLADIWWDDKKDYNPSLKSRLTISKDTSKNQVVLKVTNMDPADTATYYCARSMITCDLPQNHGLLSRNTLVLLHQMRRISPFLCLKDRRDFRFPQEMVKGSQLQKAHVMSVLHEMLQQIFSLFHTERSSAAWNMTLLDQLHTGLHQQLQHLETCLLQVVGEGESAGAISSPALTLRRYFQGIRVYLKEKKYSDCAWEVVRMEIMKSLFLSTNMQERLRSKDRDLGSSNWYFDVWGAGTTVTVSS

SEQ ID NO: 3016 - protein, 622 aa, Artificial Sequence
  source: /note="Description of Artificial Sequence: Synthetic polypeptide"
QVTLRESGPALVKPTQTLTLTCTFSGFSLSTSGMSVGWIRQPPGKALEWLADIWWDDKKDYNPSLKSRLTISKDTSKNQVVLKVTNMDPADTATYYCARSMITCDLPQNHGLLSRNTLVLLHQMRRISPFLCLKDRRDFRFPQEMVKGSQLQKAHVMSVLHEMLQQIFSLFHTERSSAAWNMTLLDQLHTGLHQQLQHLETCLLQVVGEGESAGAISSPALTLRRYFQGIRVYLKEKKYSDCAWEVVRMEIMKSLFLSTNMQERLRSKDRDLGSSNWYFDVWGAGTTVTVSSASTKGPSVFPLAPSSKSTSGGTAALGCLVKDYFPEPVTVSWNSGALTSGVHTFPAVLQSSGLYSLSSVVTVPSSSLGTQTYICNVNHKPSNTKVDKRVEPKSCDKTHTCPPCPAPELLGGPSVFLFPPKPKDTLMISRTPEVTCVVVAVSHEDPEVKFNWYVDGVEVHNAKTKPREEQYNSTYRVVSVLTVLHQDWLNGKEYKCKVSNKALAAPIEKTISKAKGQPREPQVYTLPPSREEMTKNQVSLTCLVKGFYPSDIAVEWESNGQPENNYKTTPPVLDSDGSFFLYSKLTVDKSRWQQGNVFSCSVMHEALHNHYTQKSLSLSPGK

SEQ ID NO: 3017 - protein, 10 aa, Artificial Sequence
  source: /note="Description of Artificial Sequence: Synthetic peptide"
KAQLSVGYMH

SEQ ID NO: 3018 - protein, 7 aa, Artificial Sequence
  source: /note="Description of Artificial Sequence: Synthetic peptide"
DTSKLAS

SEQ ID NO: 3019 - protein, 9 aa, Artificial Sequence
  source: /note="Description of Artificial Sequence: Synthetic peptide"
FQGSGYPFT

SEQ ID NO: 3020 - protein, 6 aa, Artificial Sequence
  source: /note="Description of Artificial Sequence: Synthetic peptide"
QLSVGY

SEQ ID NO: 3021 - protein, 3 aa, Artificial Sequence
  source: /note="Description of Artificial Sequence: Synthetic peptide"
DTS

SEQ ID NO: 3022 - protein, 6 aa, Artificial Sequence
  source: /note="Description of Artificial Sequence: Synthetic peptide"
GSGYPF

SEQ ID NO: 3023 - protein, 106 aa, Artificial Sequence; identical to SEQ ID NO: 15
  source: /note="Description of Artificial Sequence: Synthetic polypeptide"

SEQ ID NO: 3024 - protein, 213 aa, Artificial Sequence; identical to SEQ ID NO: 16
  source: /note="Description of Artificial Sequence: Synthetic polypeptide"

SEQ ID NO: 3025 - protein, 7 aa, Artificial Sequence
  source: /note="Description of Artificial Sequence: Synthetic peptide"
TSGMSVG

SEQ ID NO: 3026 - protein, 15 aa, Artificial Sequence
  source: /note="Description of Artificial Sequence: Synthetic peptide"
DIWWDDKKDYNPSLK

SEQ ID NO: 3027 - protein, 10 aa, Artificial Sequence
  source: /note="Description of Artificial Sequence: Synthetic peptide"
SMITNWYFDV

SEQ ID NO: 3028 - protein, 9 aa, Artificial Sequence
  source: /note="Description of Artificial Sequence: Synthetic peptide"
GFSLSTSGM

SEQ ID NO: 3029 - protein, 5 aa, Artificial Sequence
  source: /note="Description of Artificial Sequence: Synthetic peptide"
WWDDK

SEQ ID NO: 3030 - protein, 10 aa, Artificial Sequence
  source: /note="Description of Artificial Sequence: Synthetic peptide"
SMITNWYFDV

SEQ ID NO: 3031 - protein, 120 aa, Artificial Sequence; identical to SEQ ID NO: 55
  source: /note="Description of Artificial Sequence: Synthetic polypeptide"

SEQ ID NO: 3032 - protein, 450 aa, Artificial Sequence; identical to SEQ ID NO: 56
  source: /note="Description of Artificial Sequence: Synthetic polypeptide"

SEQ ID NO: 3033 - protein, 182 aa, Artificial Sequence
  source: /note="Description of Artificial Sequence: Synthetic polypeptide"
KAQLSCDLPQNHGLLSRNTLVLLHQMRRISPFLCLKDRRDFRFPQEMVKGSQLQKAHVMSVLHEMLQQIFSLFHTERSSAAWNMTLLDQLHTGLHQQLQHLETCLLQVVGEGESAGAISSPALTLRRYFQGIRVYLKEKKYSDCAWEVVRMEIMKSLFLSTNMQERLRSKDRDLGSSVGYMH

SEQ ID NO: 3034 - protein, 7 aa, Artificial Sequence
  source: /note="Description of Artificial Sequence: Synthetic peptide"
DTSKLAS

SEQ ID NO: 3035 - protein, 9 aa, Artificial Sequence
  source: /note="Description of Artificial Sequence: Synthetic peptide"
FQGSGYPFT

SEQ ID NO: 3036 - protein, 178 aa, Artificial Sequence
  source: /note="Description of Artificial Sequence: Synthetic polypeptide"
QLSCDLPQNHGLLSRNTLVLLHQMRRISPFLCLKDRRDFRFPQEMVKGSQLQKAHVMSVLHEMLQQIFSLFHTERSSAAWNMTLLDQLHTGLHQQLQHLETCLLQVVGEGESAGAISSPALTLRRYFQGIRVYLKEKKYSDCAWEVVRMEIMKSLFLSTNMQERLRSKDRDLGSSVGY

SEQ ID NO: 3037 - protein, 3 aa, Artificial Sequence
  source: /note="Description of Artificial Sequence: Synthetic peptide"
DTS

SEQ ID NO: 3038 - protein, 6 aa, Artificial Sequence
  source: /note="Description of Artificial Sequence: Synthetic peptide"
GSGYPF

SEQ ID NO: 3039 - protein, 278 aa, Artificial Sequence
  source: /note="Description of Artificial Sequence: Synthetic polypeptide"
DIQMTQSPSTLSASVGDRVTITCKAQLSCDLPQNHGLLSRNTLVLLHQMRRISPFLCLKDRRDFRFPQEMVKGSQLQKAHVMSVLHEMLQQIFSLFHTERSSAAWNMTLLDQLHTGLHQQLQHLETCLLQVVGEGESAGAISSPALTLRRYFQGIRVYLKEKKYSDCAWEVVRMEIMKSLFLSTNMQERLRSKDRDLGSSVGYMHWYQQKPGKAPKLLIYDTSKLASGVPSRFSGSGSGTEFTLTISSLQPDDFATYYCFQGSGYPFTFGGGTKLEIK

SEQ ID NO: 3040 - protein, 385 aa, Artificial Sequence
  source: /note="Description of Artificial Sequence: Synthetic polypeptide"
DIQMTQSPSTLSASVGDRVTITCKAQLSCDLPQNHGLLSRNTLVLLHQMRRISPFLCLKDRRDFRFPQEMVKGSQLQKAHVMSVLHEMLQQIFSLFHTERSSAAWNMTLLDQLHTGLHQQLQHLETCLLQVVGEGESAGAISSPALTLRRYFQGIRVYLKEKKYSDCAWEVVRMEIMKSLFLSTNMQERLRSKDRDLGSSVGYMHWYQQKPGKAPKLLIYDTSKLASGVPSRFSGSGSGTEFTLTISSLQPDDFATYYCFQGSGYPFTFGGGTKLEIKRTVAAPSVFIFPPSDEQLKSGTASVVCLLNNFYPREAKVQWKVDNALQSGNSQESVTEQDSKDSTYSLSSTLTLSKADYEKHKVYACEVTHQGLSSPVTKSFNRGEC

SEQ ID NO: 3041 - protein, 7 aa, Artificial Sequence
  source: /note="Description of Artificial Sequence: Synthetic peptide"
TSGMSVG

SEQ ID NO: 3042 - protein, 15 aa, Artificial Sequence
  source: /note="Description of Artificial Sequence: Synthetic peptide"
DIWWDDKKDYNPSLK

SEQ ID NO: 3043 - protein, 10 aa, Artificial Sequence
  source: /note="Description of Artificial Sequence: Synthetic peptide"
SMITNWYFDV

SEQ ID NO: 3044 - protein, 9 aa, Artificial Sequence
  source: /note="Description of Artificial Sequence: Synthetic peptide"
GFSLSTSGM

SEQ ID NO: 3045 - protein, 5 aa, Artificial Sequence
  source: /note="Description of Artificial Sequence: Synthetic peptide"
WWDDK

SEQ ID NO: 3046 - protein, 10 aa, Artificial Sequence
  source: /note="Description of Artificial Sequence: Synthetic peptide"
SMITNWYFDV

SEQ ID NO: 3047 - protein, 120 aa, Artificial Sequence; identical to SEQ ID NO: 55
  source: /note="Description of Artificial Sequence: Synthetic polypeptide"

SEQ ID NO: 3048 - protein, 450 aa, Artificial Sequence; identical to SEQ ID NO: 56
  source: /note="Description of Artificial Sequence: Synthetic polypeptide"

SEQ ID NO: 3049 - protein, 10 aa, Artificial Sequence
  source: /note="Description of Artificial Sequence: Synthetic peptide"
KAQLSVGYMH

SEQ ID NO: 3050 - protein, 179 aa, Artificial Sequence
  source: /note="Description of Artificial Sequence: Synthetic polypeptide"
DTCDLPQNHGLLSRNTLVLLHQMRRISPFLCLKDRRDFRFPQEMVKGSQLQKAHVMSVLHEMLQQIFSLFHTERSSAAWNMTLLDQLHTGLHQQLQHLETCLLQVVGEGESAGAISSPALTLRRYFQGIRVYLKEKKYSDCAWEVVRMEIMKSLFLSTNMQERLRSKDRDLGSSSKLAS

SEQ ID NO: 3051 - protein, 9 aa, Artificial Sequence
  source: /note="Description of Artificial Sequence: Synthetic peptide"
FQGSGYPFT

SEQ ID NO: 3052 - protein, 6 aa, Artificial Sequence
  source: /note="Description of Artificial Sequence: Synthetic peptide"
QLSVGY

SEQ ID NO: 3053 - protein, 175 aa, Artificial Sequence
  source: /note="Description of Artificial Sequence: Synthetic polypeptide"
DTCDLPQNHGLLSRNTLVLLHQMRRISPFLCLKDRRDFRFPQEMVKGSQLQKAHVMSVLHEMLQQIFSLFHTERSSAAWNMTLLDQLHTGLHQQLQHLETCLLQVVGEGESAGAISSPALTLRRYFQGIRVYLKEKKYSDCAWEVVRMEIMKSLFLSTNMQERLRSKDRDLGSSS

SEQ ID NO: 3054 - protein, 6 aa, Artificial Sequence
  source: /note="Description of Artificial Sequence: Synthetic peptide"
GSGYPF

SEQ ID NO: 3055 - protein, 278 aa, Artificial Sequence
  source: /note="Description of Artificial Sequence: Synthetic polypeptide"
DIQMTQSPSTLSASVGDRVTITCKAQLSVGYMHWYQQKPGKAPKLLIYDTCDLPQNHGLLSRNTLVLLHQMRRISPFLCLKDRRDFRFPQEMVKGSQLQKAHVMSVLHEMLQQIFSLFHTERSSAAWNMTLLDQLHTGLHQQLQHLETCLLQVVGEGESAGAISSPALTLRRYFQGIRVYLKEKKYSDCAWEVVRMEIMKSLFLSTNMQERLRSKDRDLGSSSKLASGVPSRFSGSGSGTEFTLTISSLQPDDFATYYCFQGSGYPFTFGGGTKLEIK

SEQ ID NO: 3056 - protein, 385 aa, Artificial Sequence
  source: /note="Description of Artificial Sequence: Synthetic polypeptide"
DIQMTQSPSTLSASVGDRVTITCKAQLSVGYMHWYQQKPGKAPKLLIYDTCDLPQNHGLLSRNTLVLLHQMRRISPFLCLKDRRDFRFPQEMVKGSQLQKAHVMSVLHEMLQQIFSLFHTERSSAAWNMTLLDQLHTGLHQQLQHLETCLLQVVGEGESAGAISSPALTLRRYFQGIRVYLKEKKYSDCAWEVVRMEIMKSLFLSTNMQERLRSKDRDLGSSSKLASGVPSRFSGSGSGTEFTLTISSLQPDDFATYYCFQGSGYPFTFGGGTKLEIKRTVAAPSVFIFPPSDEQLKSGTASVVCLLNNFYPREAKVQWKVDNALQSGNSQESVTEQDSKDSTYSLSSTLTLSKADYEKHKVYACEVTHQGLSSPVTKSFNRGEC

SEQ ID NO: 3057 - protein, 7 aa, Artificial Sequence
  source: /note="Description of Artificial Sequence: Synthetic peptide"
TSGMSVG

SEQ ID NO: 3058 - protein, 15 aa, Artificial Sequence
  source: /note="Description of Artificial Sequence: Synthetic peptide"
DIWWDDKKDYNPSLK

SEQ ID NO: 3059 - protein, 10 aa, Artificial Sequence
  source: /note="Description of Artificial Sequence: Synthetic peptide"
SMITNWYFDV

SEQ ID NO: 3060 - protein, 9 aa, Artificial Sequence
  source: /note="Description of Artificial Sequence: Synthetic peptide"
GFSLSTSGM

SEQ ID NO: 3061 - protein, 5 aa, Artificial Sequence
  source: /note="Description of Artificial Sequence: Synthetic peptide"
WWDDK

SEQ ID NO: 3062 - protein, 10 aa, Artificial Sequence
  source: /note="Description of Artificial Sequence: Synthetic peptide"
SMITNWYFDV

SEQ ID NO: 3063 - protein, 120 aa, Artificial Sequence; identical to SEQ ID NO: 55
  source: /note="Description of Artificial Sequence: Synthetic polypeptide"

SEQ ID NO: 3064 - protein, 450 aa, Artificial Sequence; identical to SEQ ID NO: 56
  source: /note="Description of Artificial Sequence: Synthetic polypeptide"

SEQ ID NO: 3065 - protein, 10 aa, Artificial Sequence
  source: /note="Description of Artificial Sequence: Synthetic peptide"
KAQLSVGYMH

SEQ ID NO: 3066 - protein, 7 aa, Artificial Sequence
  source: /note="Description of Artificial Sequence: Synthetic peptide"
DTSKLAS

SEQ ID NO: 3067 - protein, 181 aa, Artificial Sequence
  source: /note="Description of Artificial Sequence: Synthetic polypeptide"
FQGSGCDLPQNHGLLSRNTLVLLHQMRRISPFLCLKDRRDFRFPQEMVKGSQLQKAHVMSVLHEMLQQIFSLFHTERSSAAWNMTLLDQLHTGLHQQLQHLETCLLQVVGEGESAGAISSPALTLRRYFQGIRVYLKEKKYSDCAWEVVRMEIMKSLFLSTNMQERLRSKDRDLGSSYPFT

SEQ ID NO: 3068 - protein, 6 aa, Artificial Sequence
  source: /note="Description of Artificial Sequence: Synthetic peptide"
QLSVGY

SEQ ID NO: 3069 - protein, 3 aa, Artificial Sequence
  source: /note="Description of Artificial Sequence: Synthetic peptide"
DTS

SEQ ID NO: 3070 - protein, 178 aa, Artificial Sequence
  source: /note="Description of Artificial Sequence: Synthetic polypeptide"
GSGCDLPQNHGLLSRNTLVLLHQMRRISPFLCLKDRRDFRFPQEMVKGSQLQKAHVMSVLHEMLQQIFSLFHTERSSAAWNMTLLDQLHTGLHQQLQHLETCLLQVVGEGESAGAISSPALTLRRYFQGIRVYLKEKKYSDCAWEVVRMEIMKSLFLSTNMQERLRSKDRDLGSSYPF

SEQ ID NO: 3071 - protein, 278 aa, Artificial Sequence
  source: /note="Description of Artificial Sequence: Synthetic polypeptide"
DIQMTQSPSTLSASVGDRVTITCKAQLSVGYMHWYQQKPGKAPKLLIYDTSKLASGVPSRFSGSGSGTEFTLTISSLQPDDFATYYCFQGSGCDLPQNHGLLSRNTLVLLHQMRRISPFLCLKDRRDFRFPQEMVKGSQLQKAHVMSVLHEMLQQIFSLFHTERSSAAWNMTLLDQLHTGLHQQLQHLETCLLQVVGEGESAGAISSPALTLRRYFQGIRVYLKEKKYSDCAWEVVRMEIMKSLFLSTNMQERLRSKDRDLGSSYPFTFGGGTKLEIK

SEQ ID NO: 3072 - protein, 385 aa, Artificial Sequence
  source: /note="Description of Artificial Sequence: Synthetic polypeptide"
DIQMTQSPSTLSASVGDRVTITCKAQLSVGYMHWYQQKPGKAPKLLIYDTSKLASGVPSRFSGSGSGTEFTLTISSLQPDDFATYYCFQGSGCDLPQNHGLLSRNTLVLLHQMRRISPFLCLKDRRDFRFPQEMVKGSQLQKAHVMSVLHEMLQQIFSLFHTERSSAAWNMTLLDQLHTGLHQQLQHLETCLLQVVGEGESAGAISSPALTLRRYFQGIRVYLKEKKYSDCAWEVVRMEIMKSLFLSTNMQERLRSKDRDLGSSYPFTFGGGTKLEIKRTVAAPSVFIFPPSDEQLKSGTASVVCLLNNFYPREAKVQWKVDNALQSGNSQESVTEQDSKDSTYSLSSTLTLSKADYEKHKVYACEVTHQGLSSPVTKSFNRGEC

SEQ ID NO: 3073 - protein, 182 aa, Artificial Sequence
  source: /note="Description of Artificial Sequence: Synthetic polypeptide"
PVARLRGALPDARGCHIAQFKSLSPQELQAFKRAKDALEESLLLKDCKCRSRLFPRTWDLRQLQVRERPVALEAELALTLKVLEATADTDPALGDVLDQPLHTLHHILSQLRACIQPQPTAGPRTRGRLHHWLHRLQEAPKKESPGCLEASVTFNLFRLLTRDLNCVASGDLCVSTSGMSVG

SEQ ID NO: 3074 - protein, 16 aa, Artificial Sequence
  source: /note="Description of Artificial Sequence: Synthetic peptide"
DIWWDDKKDYNPSLKS

SEQ ID NO: 3075 - protein, 10 aa, Artificial Sequence
  source: /note="Description of Artificial Sequence: Synthetic peptide"
SMITNWYFDV

SEQ ID NO: 3076 - protein, 184 aa, Artificial Sequence
  source: /note="Description of Artificial Sequence: Synthetic polypeptide"
GFSLVPVARLRGALPDARGCHIAQFKSLSPQELQAFKRAKDALEESLLLKDCKCRSRLFPRTWDLRQLQVRERPVALEAELALTLKVLEATADTDPALGDVLDQPLHTLHHILSQLRACIQPQPTAGPRTRGRLHHWLHRLQEAPKKESPGCLEASVTFNLFRLLTRDLNCVASGDLCVSTSGM

SEQ ID NO: 3077 - protein, 5 aa, Artificial Sequence
  source: /note="Description of Artificial Sequence: Synthetic peptide"
WWDDK

SEQ ID NO: 3078 - protein, 10 aa, Artificial Sequence
  source: /note="Description of Artificial Sequence: Synthetic peptide"
SMITNWYFDV

SEQ ID NO: 3079 - protein, 295 aa, Artificial Sequence
  source: /note="Description of Artificial Sequence: Synthetic polypeptide"
QVTLRESGPALVKPTQTLTLTCTFSGFSLVPVARLRGALPDARGCHIAQFKSLSPQELQAFKRAKDALEESLLLKDCKCRSRLFPRTWDLRQLQVRERPVALEAELALTLKVLEATADTDPALGDVLDQPLHTLHHILSQLRACIQPQPTAGPRTRGRLHHWLHRLQEAPKKESPGCLEASVTFNLFRLLTRDLNCVASGDLCVSTSGMSVGWIRQPPGKALEWLADIWWDDKKDYNPSLKSRLTISKDTSKNQVVLKVTNMDPADTATYYCARSMITNWYFDVWGAGTTVTVSS

SEQ ID NO: 3080 - protein, 625 aa, Artificial Sequence
  source: /note="Description of Artificial Sequence: Synthetic polypeptide"
QVTLRESGPALVKPTQTLTLTCTFSGFSLVPVARLRGALPDARGCHIAQFKSLSPQELQAFKRAKDALEESLLLKDCKCRSRLFPRTWDLRQLQVRERPVALEAELALTLKVLEATADTDPALGDVLDQPLHTLHHILSQLRACIQPQPTAGPRTRGRLHHWLHRLQEAPKKESPGCLEASVTFNLFRLLTRDLNCVASGDLCVSTSGMSVGWIRQPPGKALEWLADIWWDDKKDYNPSLKSRLTISKDTSKNQVVLKVTNMDPADTATYYCARSMITNWYFDVWGAGTTVTVSSASTKGPSVFPLAPSSKSTSGGTAALGCLVKDYFPEPVTVSWNSGALTSGVHTFPAVLQSSGLYSLSSVVTVPSSSLGTQTYICNVNHKPSNTKVDKRVEPKSCDKTHTCPPCPAPELLGGPSVFLFPPKPKDTLMISRTPEVTCVVVAVSHEDPEVKFNWYVDGVEVHNAKTKPREEQYNSTYRVVSVLTVLHQDWLNGKEYKCKVSNKALAAPIEKTISKAKGQPREPQVYTLPPSREEMTKNQVSLTCLVKGFYPSDIAVEWESNGQPENNYKTTPPVLDSDGSFFLYSKLTVDKSRWQQGNVFSCSVMHEALHNHYTQKSLSLSPGK

SEQ ID NO: 3081 - protein, 10 aa, Artificial Sequence
  source: /note="Description of Artificial Sequence: Synthetic peptide"
KAQLSVGYMH

SEQ ID NO: 3082 - protein, 7 aa, Artificial Sequence
  source: /note="Description of Artificial Sequence: Synthetic peptide"
DTSKLAS

SEQ ID NO: 3083 - protein, 9 aa, Artificial Sequence
  source: /note="Description of Artificial Sequence: Synthetic peptide"
FQGSGYPFT

SEQ ID NO: 3084 - protein, 6 aa, Artificial Sequence
  source: /note="Description of Artificial Sequence: Synthetic peptide"
QLSVGY

SEQ ID NO: 3085 - protein, 3 aa, Artificial Sequence
  source: /note="Description of Artificial Sequence: Synthetic peptide"
DTS

SEQ ID NO: 3086 - protein, 6 aa, Artificial Sequence
  source: /note="Description of Artificial Sequence: Synthetic peptide"
GSGYPF

SEQ ID NO: 3087 - protein, 106 aa, Artificial Sequence; identical to SEQ ID NO: 15
  source: /note="Description of Artificial Sequence: Synthetic polypeptide"

SEQ ID NO: 3088 - protein, 213 aa, Artificial Sequence; identical to SEQ ID NO: 16
  source: /note="Description of Artificial Sequence: Synthetic polypeptide"

SEQ ID NO: 3089 - protein, 7 aa, Artificial Sequence
  source: /note="Description of Artificial Sequence: Synthetic peptide"
TSGMSVG

SEQ ID NO: 3090 - protein, 191 aa, Artificial Sequence
  source: /note="Description of Artificial Sequence: Synthetic polypeptide"
DIWWDVPVARLRGALPDARGCHIAQFKSLSPQELQAFKRAKDALEESLLLKDCKCRSRLFPRTWDLRQLQVRERPVALEAELALTLKVLEATADTDPALGDVLDQPLHTLHHILSQLRACIQPQPTAGPRTRGRLHHWLHRLQEAPKKESPGCLEASVTFNLFRLLTRDLNCVASGDLCVDKKDYNPSLKS

SEQ ID NO: 3091 - protein, 10 aa, Artificial Sequence
  source: /note="Description of Artificial Sequence: Synthetic peptide"
SMITNWYFDV

SEQ ID NO: 3092 - protein, 9 aa, Artificial Sequence
  source: /note="Description of Artificial Sequence: Synthetic peptide"
GFSLSTSGM

SEQ ID NO: 3093 - protein, 180 aa, Artificial Sequence
  source: /note="Description of Artificial Sequence: Synthetic polypeptide"
WWDVPVARLRGALPDARGCHIAQFKSLSPQELQAFKRAKDALEESLLLKDCKCRSRLFPRTWDLRQLQVRERPVALEAELALTLKVLEATADTDPALGDVLDQPLHTLHHILSQLRACIQPQPTAGPRTRGRLHHWLHRLQEAPKKESPGCLEASVTFNLFRLLTRDLNCVASGDLCVDK

SEQ ID NO: 3094 - protein, 10 aa, Artificial Sequence
  source: /note="Description of Artificial Sequence: Synthetic peptide"
SMITNWYFDV

SEQ ID NO: 3095 - protein, 295 aa, Artificial Sequence
  source: /note="Description of Artificial Sequence: Synthetic polypeptide"
QVTLRESGPALVKPTQTLTLTCTFSGFSLSTSGMSVGWIRQPPGKALEWLADIWWDVPVARLRGALPDARGCHIAQFKSLSPQELQAFKRAKDALEESLLLKDCKCRSRLFPRTWDLRQLQVRERPVALEAELALTLKVLEATADTDPALGDVLDQPLHTLHHILSQLRACIQPQPTAGPRTRGRLHHWLHRLQEAPKKESPGCLEASVTFNLFRLLTRDLNCVASGDLCVDKKDYNPSLKSRLTISKDTSANQVVLKVTNMDPADTATYYCARSMITNWYFDVWGAGTTVTVSS

SEQ ID NO: 3096 - protein, 625 aa, Artificial Sequence
  source: /note="Description of Artificial Sequence: Synthetic polypeptide"
QVTLRESGPALVKPTQTLTLTCTFSGFSLSTSGMSVGWIRQPPGKALEWLADIWWDVPVARLRGALPDARGCHIAQFKSLSPQELQAFKRAKDALEESLLLKDCKCRSRLFPRTWDLRQLQVRERPVALEAELALTLKVLEATADTDPALGDVLDQPLHTLHHILSQLRACIQPQPTAGPRTRGRLHHWLHRLQEAPKKESPGCLEASVTFNLFRLLTRDLNCVASGDLCVDKKDYNPSLKSRLTISKDTSANQVVLKVTNMDPADTATYYCARSMITNWYFDVWGAGTTVTVSSASTKGPSVFPLAPSSKSTSGGTAALGCLVKDYFPEPVTVSWNSGALTSGVHTFPAVLQSSGLYSLSSVVTVPSSSLGTQTYICNVNHKPSNTKVDKRVEPKSCDKTHTCPPCPAPELLGGPSVFLFPPKPKDTLMISRTPEVTCVVVAVSHEDPEVKFNWYVDGVEVHNAKTKPREEQYNSTYRVVSVLTVLHQDWLNGKEYKCKVSNKALAAPIEKTISKAKGQPREPQVYTLPPSREEMTKNQVSLTCLVKGFYPSDIAVEWESNGQPENNYKTTPPVLDSDGSFFLYSKLTVDKSRWQQGNVFSCSVMHEALHNHYTQKSLSLSPGK

SEQ ID NO: 3097 - protein, 10 aa, Artificial Sequence
  source: /note="Description of Artificial Sequence: Synthetic peptide"
KAQLSVGYMH

SEQ ID NO: 3098 - protein, 7 aa, Artificial Sequence
  source: /note="Description of Artificial Sequence: Synthetic peptide"
DTSKLAS

SEQ ID NO: 3099 - protein, 9 aa, Artificial Sequence
  source: /note="Description of Artificial Sequence: Synthetic peptide"
FQGSGYPFT

SEQ ID NO: 3100 - protein, 6 aa, Artificial Sequence
  source: /note="Description of Artificial Sequence: Synthetic peptide"
QLSVGY

SEQ ID NO: 3101 - protein, 3 aa, Artificial Sequence
  source: /note="Description of Artificial Sequence: Synthetic peptide"
DTS

SEQ ID NO: 3102 - protein, 6 aa, Artificial Sequence
  source: /note="Description of Artificial Sequence: Synthetic peptide"
GSGYPF

SEQ ID NO: 3103 - protein, 106 aa, Artificial Sequence; identical to SEQ ID NO: 15
  source: /note="Description of Artificial Sequence: Synthetic polypeptide"

SEQ ID NO: 3104 - protein, 213 aa, Artificial Sequence; identical to SEQ ID NO: 16
  source: /note="Description of Artificial Sequence: Synthetic polypeptide"

SEQ ID NO: 3105 - protein, 7 aa, Artificial Sequence
  source: /note="Description of Artificial Sequence: Synthetic peptide"
TSGMSVG

SEQ ID NO: 3106 - protein, 16 aa, Artificial Sequence
  source: /note="Description of Artificial Sequence: Synthetic peptide"
DIWWDDKKDYNPSLKS

SEQ ID NO: 3107 - protein, 185 aa, Artificial Sequence
  source: /note="Description of Artificial Sequence: Synthetic polypeptide"
SMITVPVARLRGALPDARGCHIAQFKSLSPQELQAFKRAKDALEESLLLKDCKCRSRLFPRTWDLRQLQVRERPVALEAELALTLKVLEATADTDPALGDVLDQPLHTLHHILSQLRACIQPQPTAGPRTRGRLHHWLHRLQEAPKKESPGCLEASVTFNLFRLLTRDLNCVASGDLCVNWYFDV

SEQ ID NO: 3108 - protein, 9 aa, Artificial Sequence
  source: /note="Description of Artificial Sequence: Synthetic peptide"
GFSLSTSGM

SEQ ID NO: 3109 - protein, 5 aa, Artificial Sequence
  source: /note="Description of Artificial Sequence: Synthetic peptide"
WWDDK

SEQ ID NO: 3110 - protein, 185 aa, Artificial Sequence; identical to SEQ ID NO: 3107
  source: /note="Description of Artificial Sequence: Synthetic polypeptide"

SEQ ID NO: 3111 - protein, 295 aa, Artificial Sequence
  source: /note="Description of Artificial Sequence: Synthetic polypeptide"
QVTLRESGPALVKPTQTLTLTCTFSGFSLSTSGMSVGWIRQPPGKALEWLADIWWDDKKDYNPSLKSRLTISKDTSANQVVLKVTNMDPADTATYYCARSMITVPVARLRGALPDARGCHIAQFKSLSPQELQAFKRAKDALEESLLLKDCKCRSRLFPRTWDLRQLQVRERPVALEAELALTLKVLEATADTDPALGDVLDQPLHTLHHILSQLRACIQPQPTAGPRTRGRLHHWLHRLQEAPKKESPGCLEASVTFNLFRLLTRDLNCVASGDLCVNWYFDVWGAGTTVTVSS

SEQ ID NO: 3112 - protein, 625 aa, Artificial Sequence
  source: /note="Description of Artificial Sequence: Synthetic polypeptide"
QVTLRESGPALVKPTQTLTLTCTFSGFSLSTSGMSVGWIRQPPGKALEWLADIWWDDKKDYNPSLKSRLTISKDTSANQVVLKVTNMDPADTATYYCARSMITVPVARLRGALPDARGCHIAQFKSLSPQELQAFKRAKDALEESLLLKDCKCRSRLFPRTWDLRQLQVRERPVALEAELALTLKVLEATADTDPALGDVLDQPLHTLHHILSQLRACIQPQPTAGPRTRGRLHHWLHRLQEAPKKESPGCLEASVTFNLFRLLTRDLNCVASGDLCVNWYFDVWGAGTTVTVSSASTKGPSVFPLAPSSKSTSGGTAALGCLVKDYFPEPVTVSWNSGALTSGVHTFPAVLQSSGLYSLSSVVTVPSSSLGTQTYICNVNHKPSNTKVDKRVEPKSCDKTHTCPPCPAPELLGGPSVFLFPPKPKDTLMISRTPEVTCVVVAVSHEDPEVKFNWYVDGVEVHNAKTKPREEQYNSTYRVVSVLTVLHQDWLNGKEYKCKVSNKALAAPIEKTISKAKGQPREPQVYTLPPSREEMTKNQVSLTCLVKGFYPSDIAVEWESNGQPENNYKTTPPVLDSDGSFFLYSKLTVDKSRWQQGNVFSCSVMHEALHNHYTQKSLSLSPGK

SEQ ID NO: 3113 - protein, 10 aa, Artificial Sequence
  source: /note="Description of Artificial Sequence: Synthetic peptide"
KAQLSVGYMH

SEQ ID NO: 3114 - protein, 7 aa, Artificial Sequence
  source: /note="Description of Artificial Sequence: Synthetic peptide"
DTSKLAS

SEQ ID NO: 3115 - protein, 9 aa, Artificial Sequence
  source: /note="Description of Artificial Sequence: Synthetic peptide"
FQGSGYPFT

SEQ ID NO: 3116 - protein, 6 aa, Artificial Sequence
  source: /note="Description of Artificial Sequence: Synthetic peptide"
QLSVGY

SEQ ID NO: 3117 - protein, 3 aa, Artificial Sequence
  source: /note="Description of Artificial Sequence: Synthetic peptide"
DTS

SEQ ID NO: 3118 - protein, 6 aa, Artificial Sequence
  source: /note="Description of Artificial Sequence: Synthetic peptide"
GSGYPF

SEQ ID NO: 3119 - protein, 106 aa, Artificial Sequence; identical to SEQ ID NO: 15
  source: /note="Description of Artificial Sequence: Synthetic polypeptide"

SEQ ID NO: 3120 - protein, 213 aa, Artificial Sequence; identical to SEQ ID NO: 16
  source: /note="Description of Artificial Sequence: Synthetic polypeptide"

SEQ ID NO: 3121 - protein, 7 aa, Artificial Sequence
  source: /note="Description of Artificial Sequence: Synthetic peptide"
TSGMSVG

SEQ ID NO: 3122 - protein, 15 aa, Artificial Sequence
  source: /note="Description of Artificial Sequence: Synthetic peptide"
DIWWDDKKDYNPSLK

SEQ ID NO: 3123 - protein, 10 aa, Artificial Sequence
  source: /note="Description of Artificial Sequence: Synthetic peptide"
SMITNWYFDV

SEQ ID NO: 3124 - protein, 9 aa, Artificial Sequence
  source: /note="Description of Artificial Sequence: Synthetic peptide"
GFSLSTSGM

SEQ ID NO: 3125 - protein, 5 aa, Artificial Sequence
  source: /note="Description of Artificial Sequence: Synthetic peptide"
WWDDK

SEQ ID NO: 3126 - protein, 10 aa, Artificial Sequence
  source: /note="Description of Artificial Sequence: Synthetic peptide"
SMITNWYFDV

SEQ ID NO: 3127 - protein, 120 aa, Artificial Sequence; identical to SEQ ID NO: 55
  source: /note="Description of Artificial Sequence: Synthetic polypeptide"

SEQ ID NO: 3128 - protein, 450 aa, Artificial Sequence; identical to SEQ ID NO: 56
  source: /note="Description of Artificial Sequence: Synthetic polypeptide"

SEQ ID NO: 3129 - protein, 185 aa, Artificial Sequence
  source: /note="Description of Artificial Sequence: Synthetic polypeptide"
KAQLSVPVARLRGALPDARGCHIAQFKSLSPQELQAFKRAKDALEESLLLKDCKCRSRLFPRTWDLRQLQVRERPVALEAELALTLKVLEATADTDPALGDVLDQPLHTLHHILSQLRACIQPQPTAGPRTRGRLHHWLHRLQEAPKKESPGCLEASVTFNLFRLLTRDLNCVASGDLCVVGYMH

SEQ ID NO: 3130 - protein, 7 aa, Artificial Sequence
  source: /note="Description of Artificial Sequence: Synthetic peptide"
DTSKLAS

SEQ ID NO: 3131 - protein, 9 aa, Artificial Sequence
  source: /note="Description of Artificial Sequence: Synthetic peptide"
FQGSGYPFT

SEQ ID NO: 3132 - protein, 181 aa, Artificial Sequence
  source: /note="Description of Artificial Sequence: Synthetic polypeptide"
QLSVPVARLRGALPDARGCHIAQFKSLSPQELQAFKRAKDALEESLLLKDCKCRSRLFPRTWDLRQLQVRERPVALEAELALTLKVLEATADTDPALGDVLDQPLHTLHHILSQLRACIQPQPTAGPRTRGRLHHWLHRLQEAPKKESPGCLEASVTFNLFRLLTRDLNCVASGDLCVVGY

SEQ ID NO: 3133 - protein, 3 aa, Artificial Sequence
  source: /note="Description of Artificial Sequence: Synthetic peptide"
DTS

SEQ ID NO: 3134 - protein, 6 aa, Artificial Sequence
  source: /note="Description of Artificial Sequence: Synthetic peptide"
GSGYPF

SEQ ID NO: 3135 - protein, 281 aa, Artificial Sequence
  source: /note="Description of Artificial Sequence: Synthetic polypeptide"
DIQMTQSPSTLSASVGDRVTITCKAQLSVPVARLRGALPDARGCHIAQFKSLSPQELQAFKRAKDALEESLLLKDCKCRSRLFPRTWDLRQLQVRERPVALEAELALTLKVLEATADTDPALGDVLDQPLHTLHHILSQLRACIQPQPTAGPRTRGRLHHWLHRLQEAPKKESPGCLEASVTFNLFRLLTRDLNCVASGDLCVVGYMHWYQQKPGKAPKLLIYDTSKLASGVPSRFSGSGSGTEFTLTISSLQPDDFATYYCFQGSGYPFTFGGGTKLEIK

SEQ ID NO: 3136 - protein, 388 aa, Artificial Sequence
  source: /note="Description of Artificial Sequence: Synthetic polypeptide"
DIQMTQSPSTLSASVGDRVTITCKAQLSVPVARLRGALPDARGCHIAQFKSLSPQELQAFKRAKDALEESLLLKDCKCRSRLFPRTWDLRQLQVRERPVALEAELALTLKVLEATADTDPALGDVLDQPLHTLHHILSQLRACIQPQPTAGPRTRGRLHHWLHRLQEAPKKESPGCLEASVTFNLFRLLTRDLNCVASGDLCVVGYMHWYQQKPGKAPKLLIYDTSKLASGVPSRFSGSGSGTEFTLTISSLQPDDFATYYCFQGSGYPFTFGGGTKLEIKRTVAAPSVFIFPPSDEQLKSGTASVVCLLNNFYPREAKVQWKVDNALQSGNSQESVTEQDSKDSTYSLSSTLTLSKADYEKHKVYACEVTHQGLSSPVTKSFNRGEC

SEQ ID NO: 3137 - protein, 7 aa, Artificial Sequence
  source: /note="Description of Artificial Sequence: Synthetic peptide"
TSGMSVG

SEQ ID NO: 3138 - protein, 15 aa, Artificial Sequence
  source: /note="Description of Artificial Sequence: Synthetic peptide"
DIWWDDKKDYNPSLK

SEQ ID NO: 3139 - protein, 10 aa, Artificial Sequence
  source: /note="Description of Artificial Sequence: Synthetic peptide"
SMITNWYFDV

SEQ ID NO: 3140 - protein, 9 aa, Artificial Sequence
  source: /note="Description of Artificial Sequence: Synthetic peptide"
GFSLSTSGM

SEQ ID NO: 3141 - protein, 5 aa, Artificial Sequence
  source: /note="Description of Artificial Sequence: Synthetic peptide"
WWDDK

SEQ ID NO: 3142 - protein, 10 aa, Artificial Sequence
  source: /note="Description of Artificial Sequence: Synthetic peptide"
SMITNWYFDV

SEQ ID NO: 3143 - protein, 120 aa, Artificial Sequence; identical to SEQ ID NO: 55
  source: /note="Description of Artificial Sequence: Synthetic polypeptide"

SEQ ID NO: 3144 - protein, 450 aa, Artificial Sequence; identical to SEQ ID NO: 56
  source: /note="Description of Artificial Sequence: Synthetic polypeptide"

SEQ ID NO: 3145 - protein, 10 aa, Artificial Sequence
  source: /note="Description of Artificial Sequence: Synthetic peptide"
KAQLSVGYMH

SEQ ID NO: 3146 - protein, 182 aa, Artificial Sequence
  source: /note="Description of Artificial Sequence: Synthetic polypeptide"
DTVPVARLRGALPDARGCHIAQFKSLSPQELQAFKRAKDALEESLLLKDCKCRSRLFPRTWDLRQLQVRERPVALEAELALTLKVLEATADTDPALGDVLDQPLHTLHHILSQLRACIQPQPTAGPRTRGRLHHWLHRLQEAPKKESPGCLEASVTFNLFRLLTRDLNCVASGDLCVSKLAS

SEQ ID NO: 3147 - protein, 9 aa, Artificial Sequence
  source: /note="Description of Artificial Sequence: Synthetic peptide"
FQGSGYPFT

SEQ ID NO: 3148 - protein, 6 aa, Artificial Sequence
  source: /note="Description of Artificial Sequence: Synthetic peptide"
QLSVGY

SEQ ID NO: 3149 - protein, 178 aa, Artificial Sequence
  source: /note="Description of Artificial Sequence: Synthetic polypeptide"
DTVPVARLRGALPDARGCHIAQFKSLSPQELQAFKRAKDALEESLLLKDCKCRSRLFPRTWDLRQLQVRERPVALEAELALTLKVLEATADTDPALGDVLDQPLHTLHHILSQLRACIQPQPTAGPRTRGRLHHWLHRLQEAPKKESPGCLEASVTFNLFRLLTRDLNCVASGDLCVS

SEQ ID NO: 3150 - protein, 6 aa, Artificial Sequence
  source: /note="Description of Artificial Sequence: Synthetic peptide"
GSGYPF

SEQ ID NO: 3151 - protein, 281 aa, Artificial Sequence
  source: /note="Description of Artificial Sequence: Synthetic polypeptide"
DIQMTQSPSTLSASVGDRVTITCKAQLSVGYMHWYQQKPGKAPKLLIYDTVPVARLRGALPDARGCHIAQFKSLSPQELQAFKRAKDALEESLLLKDCKCRSRLFPRTWDLRQLQVRERPVALEAELALTLKVLEATADTDPALGDVLDQPLHTLHHILSQLRACIQPQPTAGPRTRGRLHHWLHRLQEAPKKESPGCLEASVTFNLFRLLTRDLNCVASGDLCVSKLASGVPSRFSGSGSGTEFTLTISSLQPDDFATYYCFQGSGYPFTFGGGTKLEIK

SEQ ID NO: 3152 - protein, 388 aa, Artificial Sequence
  source: /note="Description of Artificial Sequence: Synthetic polypeptide"
DIQMTQSPSTLSASVGDRVTITCKAQLSVGYMHWYQQKPGKAPKLLIYDTVPVARLRGALPDARGCHIAQFKSLSPQELQAFKRAKDALEESLLLKDCKCRSRLFPRTWDLRQLQVRERPVALEAELALTLKVLEATADTDPALGDVLDQPLHTLHHILSQLRACIQPQPTAGPRTRGRLHHWLHRLQEAPKKESPGCLEASVTFNLFRLLTRDLNCVASGDLCVSKLASGVPSRFSGSGSGTEFTLTISSLQPDDFATYYCFQGSGYPFTFGGGTKLEIKRTVAAPSVFIFPPSDEQLKSGTASVVCLLNNFYPREAKVQWKVDNALQSGNSQESVTEQDSKDSTYSLSSTLTLSKADYEKHKVYACEVTHQGLSSPVTKSFNRGEC

SEQ ID NO: 3153 - protein, 7 aa, Artificial Sequence
  source: /note="Description of Artificial Sequence: Synthetic peptide"
TSGMSVG

SEQ ID NO: 3154 - protein, 15 aa, Artificial Sequence
  source: /note="Description of Artificial Sequence: Synthetic peptide"
DIWWDDKKDYNPSLK

SEQ ID NO: 3155 - protein, 10 aa, Artificial Sequence
  source: /note="Description of Artificial Sequence: Synthetic peptide"
SMITNWYFDV

SEQ ID NO: 3156 - protein, 9 aa, Artificial Sequence
  source: /note="Description of Artificial Sequence: Synthetic peptide"
GFSLSTSGM

SEQ ID NO: 3157 - protein, 5 aa, Artificial Sequence
  source: /note="Description of Artificial Sequence: Synthetic peptide"
WWDDK

SEQ ID NO: 3158 - protein, 10 aa, Artificial Sequence
  source: /note="Description of Artificial Sequence: Synthetic peptide"
SMITNWYFDV

SEQ ID NO: 3159 - protein, 120 aa, Artificial Sequence; identical to SEQ ID NO: 55
  source: /note="Description of Artificial Sequence: Synthetic polypeptide"

SEQ ID NO: 3160 - protein, 450 aa, Artificial Sequence; identical to SEQ ID NO: 56
  source: /note="Description of Artificial Sequence: Synthetic polypeptide"

SEQ ID NO: 3161 - protein, 10 aa, Artificial Sequence
  source: /note="Description of Artificial Sequence: Synthetic peptide"
KAQLSVGYMH

SEQ ID NO: 3162 - protein, 7 aa, Artificial Sequence
  source: /note="Description of Artificial Sequence: Synthetic peptide"
DTSKLAS

SEQ ID NO: 3163 - protein, 184 aa, Artificial Sequence
  source: /note="Description of Artificial Sequence: Synthetic polypeptide"
FQGSGVPVARLRGALPDARGCHIAQFKSLSPQELQAFKRAKDALEESLLLKDCKCRSRLFPRTWDLRQLQVRERPVALEAELALTLKVLEATADTDPALGDVLDQPLHTLHHILSQLRACIQPQPTAGPRTRGRLHHWLHRLQEAPKKESPGCLEASVTFNLFRLLTRDLNCVASGDLCVYPFT

SEQ ID NO: 3164 - protein, 6 aa, Artificial Sequence
  source: /note="Description of Artificial Sequence: Synthetic peptide"
QLSVGY

SEQ ID NO: 3165 - protein, 3 aa, Artificial Sequence
  source: /note="Description of Artificial Sequence: Synthetic peptide"
DTS

SEQ ID NO: 3166 - protein, 181 aa, Artificial Sequence
  source: /note="Description of Artificial Sequence: Synthetic polypeptide"
GSGVPVARLRGALPDARGCHIAQFKSLSPQELQAFKRAKDALEESLLLKDCKCRSRLFPRTWDLRQLQVRERPVALEAELALTLKVLEATADTDPALGDVLDQPLHTLHHILSQLRACIQPQPTAGPRTRGRLHHWLHRLQEAPKKESPGCLEASVTFNLFRLLTRDLNCVASGDLCVYPF

SEQ ID NO: 3167 - protein, 281 aa, Artificial Sequence
  source: /note="Description of Artificial Sequence: Synthetic polypeptide"
DIQMTQSPSTLSASVGDRVTITCKAQLSVGYMHWYQQKPGKAPKLLIYDTSKLASGVPSRFSGSGSGTEFTLTISSLQPDDFATYYCFQGSGVPVARLRGALPDARGCHIAQFKSLSPQELQAFKRAKDALEESLLLKDCKCRSRLFPRTWDLRQLQVRERPVALEAELALTLKVLEATADTDPALGDVLDQPLHTLHHILSQLRACIQPQPTAGPRTRGRLHHWLHRLQEAPKKESPGCLEASVTFNLFRLLTRDLNCVASGDLCVYPFTFGGGTKLEIK

SEQ ID NO: 3168 - protein, 388 aa, Artificial Sequence
  source: /note="Description of Artificial Sequence: Synthetic polypeptide"
DIQMTQSPSTLSASVGDRVTITCKAQLSVGYMHWYQQKPGKAPKLLIYDTSKLASGVPSRFSGSGSGTEFTLTISSLQPDDFATYYCFQGSGVPVARLRGALPDARGCHIAQFKSLSPQELQAFKRAKDALEESLLLKDCKCRSRLFPRTWDLRQLQVRERPVALEAELALTLKVLEATADTDPALGDVLDQPLHTLHHILSQLRACIQPQPTAGPRTRGRLHHWLHRLQEAPKKESPGCLEASVTFNLFRLLTRDLNCVASGDLCVYPFTFGGGTKLEIKRTVAAPSVFIFPPSDEQLKSGTASVVCLLNNFYPREAKVQWKVDNALQSGNSQESVTEQDSKDSTYSLSSTLTLSKADYEKHKVYACEVTHQGLSSPVTKSFNRGEC

SEQ ID NO: 3169 - protein, 188 aa, Artificial Sequence
  source: /note="Description of Artificial Sequence: Synthetic polypeptide"
PVPTSKPTTTGKGCHIGRFKSLSPQELASFKKARDALEESLKLKNWSCSSPVFPGNWDLRLLQVRERPVALEAELALTLKVLEAAAGPALEDVLDQPLHTLHHILSQLQACIQPQPTAGPRPRGRLHHWLHRLQEAPKKESAGCLEASVTFNLFRLLTRDLKYVADGNLCLRTSTHPESTSTSGMSVG

SEQ ID NO: 3170 - protein, 16 aa, Artificial Sequence
  source: /note="Description of Artificial Sequence: Synthetic peptide"
DIWWDDKKDYNPSLKS

SEQ ID NO: 3171 - protein, 10 aa, Artificial Sequence
  source: /note="Description of Artificial Sequence: Synthetic peptide"
SMITNWYFDV

SEQ ID NO: 3172 - protein, 190 aa, Artificial Sequence
  source: /note="Description of Artificial Sequence: Synthetic polypeptide"
GFSLGPVPTSKPTTTGKGCHIGRFKSLSPQELASFKKARDALEESLKLKNWSCSSPVFPGNWDLRLLQVRERPVALEAELALTLKVLEAAAGPALEDVLDQPLHTLHHILSQLQACIQPQPTAGPRPRGRLHHWLHRLQEAPKKESAGCLEASVTFNLFRLLTRDLKYVADGNLCLRTSTHPESTSTSGM

SEQ ID NO: 3173 - protein, 5 aa, Artificial Sequence
  source: /note="Description of Artificial Sequence: Synthetic peptide"
WWDDK

SEQ ID NO: 3174 - protein, 10 aa, Artificial Sequence
  source: /note="Description of Artificial Sequence: Synthetic peptide"
SMITNWYFDV

SEQ ID NO: 3175 - protein, 301 aa, Artificial Sequence
  source: /note="Description of Artificial Sequence: Synthetic polypeptide"
QVTLRESGPALVKPTQTLTLTCTFSGFSLGPVPTSKPTTTGKGCHIGRFKSLSPQELASFKKARDALEESLKLKNWSCSSPVFPGNWDLRLLQVRERPVALEAELALTLKVLEAAAGPALEDVLDQPLHTLHHILSQLQACIQPQPTAGPRPRGRLHHWLHRLQEAPKKESAGCLEASVTFNLFRLLTRDLKYVADGNLCLRTSTHPESTSTSGMSVGWIRQPPGKALEWLADIWWDDKKDYNPSLKSRLTISKDTSKNQVVLKVTNMDPADTATYYCARSMITNWYFDVWGAGTTVTVSS

SEQ ID NO: 3176 - protein, 631 aa, Artificial Sequence
  source: /note="Description of Artificial Sequence: Synthetic polypeptide"
QVTLRESGPALVKPTQTLTLTCTFSGFSLGPVPTSKPTTTGKGCHIGRFKSLSPQELASFKKARDALEESLKLKNWSCSSPVFPGNWDLRLLQVRERPVALEAELALTLKVLEAAAGPALEDVLDQPLHTLHHILSQLQACIQPQPTAGPRPRGRLHHWLHRLQEAPKKESAGCLEASVTFNLFRLLTRDLKYVADGNLCLRTSTHPESTSTSGMSVGWIRQPPGKALEWLADIWWDDKKDYNPSLKSRLTISKDTSKNQVVLKVTNMDPADTATYYCARSMITNWYFDVWGAGTTVTVSSASTKGPSVFPLAPSSKSTSGGTAALGCLVKDYFPEPVTVSWNSGALTSGVHTFPAVLQSSGLYSLSSVVTVPSSSLGTQTYICNVNHKPSNTKVDKRVEPKSCDKTHTCPPCPAPELLGGPSVFLFPPKPKDTLMISRTPEVTCVVVAVSHEDPEVKFNWYVDGVEVHNAKTKPREEQYNSTYRVVSVLTVLHQDWLNGKEYKCKVSNKALAAPIEKTISKAKGQPREPQVYTLPPSREEMTKNQVSLTCLVKGFYPSDIAVEWESNGQPENNYKTTPPVLDSDGSFFLYSKLTVDKSRWQQGNVFSCSVMHEALHNHYTQKSLSLSPGK

SEQ ID NO: 3177 - protein, 10 aa, Artificial Sequence
  source: /note="Description of Artificial Sequence: Synthetic peptide"
KAQLSVGYMH

SEQ ID NO: 3178 - protein, 7 aa, Artificial Sequence
  source: /note="Description of Artificial Sequence: Synthetic peptide"
DTSKLAS

SEQ ID NO: 3179 - protein, 9 aa, Artificial Sequence
  source: /note="Description of Artificial Sequence: Synthetic peptide"
FQGSGYPFT

SEQ ID NO: 3180 - protein, 6 aa, Artificial Sequence
  source: /note="Description of Artificial Sequence: Synthetic peptide"
QLSVGY

SEQ ID NO: 3181 - protein, 3 aa, Artificial Sequence
  source: /note="Description of Artificial Sequence: Synthetic peptide"
DTS

SEQ ID NO: 3182 - protein, 6 aa, Artificial Sequence
  source: /note="Description of Artificial Sequence: Synthetic peptide"
GSGYPF

SEQ ID NO: 3183 - protein, 106 aa, Artificial Sequence; identical to SEQ ID NO: 15
  source: /note="Description of Artificial Sequence: Synthetic polypeptide"

SEQ ID NO: 3184 - protein, 213 aa, Artificial Sequence; identical to SEQ ID NO: 16
  source: /note="Description of Artificial Sequence: Synthetic polypeptide"

SEQ ID NO: 3185 - protein, 7 aa, Artificial Sequence
  source: /note="Description of Artificial Sequence: Synthetic peptide"
TSGMSVG

SEQ ID NO: 3186 - protein, 197 aa, Artificial Sequence
  source: /note="Description of Artificial Sequence: Synthetic polypeptide"
DIWWDGPVPTSKPTTTGKGCHIGRFKSLSPQELASFKKARDALEESLKLKNWSCSSPVFPGNWDLRLLQVRERPVALEAELALTLKVLEAAAGPALEDVLDQPLHTLHHILSQLQACIQPQPTAGPRPRGRLHHWLHRLQEAPKKESAGCLEASVTFNLFRLLTRDLKYVADGNLCLRTSTHPESTDKKDYNPSLKS

SEQ ID NO: 3187 - protein, 10 aa, Artificial Sequence
  source: /note="Description of Artificial Sequence: Synthetic peptide"
SMITNWYFDV

SEQ ID NO: 3188 - protein, 9 aa, Artificial Sequence
  source: /note="Description of Artificial Sequence: Synthetic peptide"
GFSLSTSGM

SEQ ID NO: 3189 - protein, 186 aa, Artificial Sequence
  source: /note="Description of Artificial Sequence: Synthetic polypeptide"
WWDGPVPTSKPTTTGKGCHIGRFKSLSPQELASFKKARDALEESLKLKNWSCSSPVFPGNWDLRLLQVRERPVALEAELALTLKVLEAAAGPALEDVLDQPLHTLHHILSQLQACIQPQPTAGPRPRGRLHHWLHRLQEAPKKESAGCLEASVTFNLFRLLTRDLKYVADGNLCLRTSTHPESTDK

SEQ ID NO: 3190 - protein, 10 aa, Artificial Sequence
  source: /note="Description of Artificial Sequence: Synthetic peptide"
SMITNWYFDV

SEQ ID NO: 3191 - protein, 301 aa, Artificial Sequence
  source: /note="Description of Artificial Sequence: Synthetic polypeptide"
QVTLRESGPALVKPTQTLTLTCTFSGFSLSTSGMSVGWIRQPPGKALEWLADIWWDGPVPTSKPTTTGKGCHIGRFKSLSPQELASFKKARDALEESLKLKNWSCSSPVFPGNWDLRLLQVRERPVALEAELALTLKVLEAAAGPALEDVLDQPLHTLHHILSQLQACIQPQPTAGPRPRGRLHHWLHRLQEAPKKESAGCLEASVTFNLFRLLTRDLKYVADGNLCLRTSTHPESTDKKDYNPSLKSRLTISKDTSANQVVLKVTNMDPADTATYYCARSMITNWYFDVWGAGTTVTVSS

SEQ ID NO: 3192 - protein, 631 aa, Artificial Sequence
  source: /note="Description of Artificial Sequence: Synthetic polypeptide"
QVTLRESGPALVKPTQTLTLTCTFSGFSLSTSGMSVGWIRQPPGKALEWLADIWWDGPVPTSKPTTTGKGCHIGRFKSLSPQELASFKKARDALEESLKLKNWSCSSPVFPGNWDLRLLQVRERPVALEAELALTLKVLEAAAGPALEDVLDQPLHTLHHILSQLQACIQPQPTAGPRPRGRLHHWLHRLQEAPKKESAGCLEASVTFNLFRLLTRDLKYVADGNLCLRTSTHPESTDKKDYNPSLKSRLTISKDTSANQVVLKVTNMDPADTATYYCARSMITNWYFDVWGAGTTVTVSSASTKGPSVFPLAPSSKSTSGGTAALGCLVKDYFPEPVTVSWNSGALTSGVHTFPAVLQSSGLYSLSSVVTVPSSSLGTQTYICNVNHKPSNTKVDKRVEPKSCDKTHTCPPCPAPELLGGPSVFLFPPKPKDTLMISRTPEVTCVVVAVSHEDPEVKFNWYVDGVEVHNAKTKPREEQYNSTYRVVSVLTVLHQDWLNGKEYKCKVSNKALAAPIEKTISKAKGQPREPQVYTLPPSREEMTKNQVSLTCLVKGFYPSDIAVEWESNGQPENNYKTTPPVLDSDGSFFLYSKLTVDKSRWQQGNVFSCSVMHEALHNHYTQKSLSLSPGK

SEQ ID NO: 3193 - protein, 10 aa, Artificial Sequence
  source: /note="Description of Artificial Sequence: Synthetic peptide"
KAQLSVGYMH

SEQ ID NO: 3194 - protein, 7 aa, Artificial Sequence
  source: /note="Description of Artificial Sequence: Synthetic peptide"
DTSKLAS

SEQ ID NO: 3195 - protein, 9 aa, Artificial Sequence
  source: /note="Description of Artificial Sequence: Synthetic peptide"
FQGSGYPFT

SEQ ID NO: 3196 - protein, 6 aa, Artificial Sequence
  source: /note="Description of Artificial Sequence: Synthetic peptide"
QLSVGY

SEQ ID NO: 3197 - protein, 3 aa, Artificial Sequence
  source: /note="Description of Artificial Sequence: Synthetic peptide"
DTS

SEQ ID NO: 3198 - protein, 6 aa, Artificial Sequence
  source: /note="Description of Artificial Sequence: Synthetic peptide"
GSGYPF

SEQ ID NO: 3199 - protein, 106 aa, Artificial Sequence; identical to SEQ ID NO: 15
  source: /note="Description of Artificial Sequence: Synthetic polypeptide"

SEQ ID NO: 3200 - protein, 213 aa, Artificial Sequence; identical to SEQ ID NO: 16
  source: /note="Description of Artificial Sequence: Synthetic polypeptide"

SEQ ID NO: 3201 - protein, 7 aa, Artificial Sequence
  source: /note="Description of Artificial Sequence: Synthetic peptide"
TSGMSVG

SEQ ID NO: 3202 - protein, 16 aa, Artificial Sequence
  source: /note="Description of Artificial Sequence: Synthetic peptide"
DIWWDDKKDYNPSLKS

SEQ ID NO: 3203 - protein, 191 aa, Artificial Sequence
  source: /note="Description of Artificial Sequence: Synthetic polypeptide"
SMITGPVPTSKPTTTGKGCHIGRFKSLSPQELASFKKARDALEESLKLKNWSCSSPVFPGNWDLRLLQVRERPVALEAELALTLKVLEAAAGPALEDVLDQPLHTLHHILSQLQACIQPQPTAGPRPRGRLHHWLHRLQEAPKKESAGCLEASVTFNLFRLLTRDLKYVADGNLCLRTSTHPESTNWYFDV

SEQ ID NO: 3204 - protein, 9 aa, Artificial Sequence
  source: /note="Description of Artificial Sequence: Synthetic peptide"
GFSLSTSGM

SEQ ID NO: 3205 - protein, 5 aa, Artificial Sequence
  source: /note="Description of Artificial Sequence: Synthetic peptide"
WWDDK

SEQ ID NO: 3206 - protein, 191 aa, Artificial Sequence; identical to SEQ ID NO: 3203
  source: /note="Description of Artificial Sequence: Synthetic polypeptide"

SEQ ID NO: 3207 - protein, 301 aa, Artificial Sequence
  source: /note="Description of Artificial Sequence: Synthetic polypeptide"
QVTLRESGPALVKPTQTLTLTCTFSGFSLSTSGMSVGWIRQPPGKALEWLADIWWDDKKDYNPSLKSRLTISKDTSKNQVVLKVTNMDPADTATYYCARSMITGPVPTSKPTTTGKGCHIGRFKSLSPQELASFKKARDALEESLKLKNWSCSSPVFPGNWDLRLLQVRERPVALEAELALTLKVLEAAAGPALEDVLDQPLHTLHHILSQLQACIQPQPTAGPRPRGRLHHWLHRLQEAPKKESAGCLEASVTFNLFRLLTRDLKYVADGNLCLRTSTHPESTNWYFDVWGAGTTVTVSS

SEQ ID NO: 3208 - protein, 631 aa, Artificial Sequence
  source: /note="Description of Artificial Sequence: Synthetic polypeptide"
QVTLRESGPALVKPTQTLTLTCTFSGFSLSTSGMSVGWIRQPPGKALEWLADIWWDDKKDYNPSLKSRLTISKDTSKNQVVLKVTNMDPADTATYYCARSMITGPVPTSKPTTTGKGCHIGRFKSLSPQELASFKKARDALEESLKLKNWSCSSPVFPGNWDLRLLQVRERPVALEAELALTLKVLEAAAGPALEDVLDQPLHTLHHILSQLQACIQPQPTAGPRPRGRLHHWLHRLQEAPKKESAGCLEASVTFNLFRLLTRDLKYVADGNLCLRTSTHPESTNWYFDVWGAGTTVTVSSASTKGPSVFPLAPSSKSTSGGTAALGCLVKDYFPEPVTVSWNSGALTSGVHTFPAVLQSSGLYSLSSVVTVPSSSLGTQTYICNVNHKPSNTKVDKRVEPKSCDKTHTCPPCPAPELLGGPSVFLFPPKPKDTLMISRTPEVTCVVVAVSHEDPEVKFNWYVDGVEVHNAKTKPREEQYNSTYRVVSVLTVLHQDWLNGKEYKCKVSNKALAAPIEKTISKAKGQPREPQVYTLPPSREEMTKNQVSLTCLVKGFYPSDIAVEWESNGQPENNYKTTPPVLDSDGSFFLYSKLTVDKSRWQQGNVFSCSVMHEALHNHYTQKSLSLSPGK

SEQ ID NO: 3209 - protein, 10 aa, Artificial Sequence
  source: /note="Description of Artificial Sequence: Synthetic peptide"
KAQLSVGYMH

SEQ ID NO: 3210 - protein, 7 aa, Artificial Sequence
  source: /note="Description of Artificial Sequence: Synthetic peptide"
DTSKLAS

SEQ ID NO: 3211 - protein, 9 aa, Artificial Sequence
  source: /note="Description of Artificial Sequence: Synthetic peptide"
FQGSGYPFT

SEQ ID NO: 3212 - protein, 6 aa, Artificial Sequence
  source: /note="Description of Artificial Sequence: Synthetic peptide"
QLSVGY

SEQ ID NO: 3213 - protein, 3 aa, Artificial Sequence
  source: /note="Description of Artificial Sequence: Synthetic peptide"
DTS

SEQ ID NO: 3214 - protein, 6 aa, Artificial Sequence
  source: /note="Description of Artificial Sequence: Synthetic peptide"
GSGYPF

SEQ ID NO: 3215 - protein, 106 aa, Artificial Sequence; identical to SEQ ID NO: 15
  source: /note="Description of Artificial Sequence: Synthetic polypeptide"

SEQ ID NO: 3216 - protein, 213 aa, Artificial Sequence; identical to SEQ ID NO: 16
  source: /note="Description of Artificial Sequence: Synthetic polypeptide"

SEQ ID NO: 3217 - protein, 7 aa, Artificial Sequence
  source: /note="Description of Artificial Sequence: Synthetic peptide"
TSGMSVG

SEQ ID NO: 3218 - protein, 15 aa, Artificial Sequence
  source: /note="Description of Artificial Sequence: Synthetic peptide"
DIWWDDKKDYNPSLK

SEQ ID NO: 3219 - protein, 10 aa, Artificial Sequence
  source: /note="Description of Artificial Sequence: Synthetic peptide"
SMITNWYFDV

SEQ ID NO: 3220 - protein, 9 aa, Artificial Sequence
  source: /note="Description of Artificial Sequence: Synthetic peptide"
GFSLSTSGM

SEQ ID NO: 3221 - protein, 5 aa, Artificial Sequence
  source: /note="Description of Artificial Sequence: Synthetic peptide"
WWDDK

SEQ ID NO: 3222 - protein, 10 aa, Artificial Sequence
  source: /note="Description of Artificial Sequence: Synthetic peptide"
SMITNWYFDV

SEQ ID NO: 3223 - protein, 120 aa, Artificial Sequence; identical to SEQ ID NO: 55
  source: /note="Description of Artificial Sequence: Synthetic polypeptide"

SEQ ID NO: 3224 - protein, 450 aa, Artificial Sequence; identical to SEQ ID NO: 56
  source: /note="Description of Artificial Sequence: Synthetic polypeptide"

SEQ ID NO: 3225 - protein, 191 aa, Artificial Sequence
  source: /note="Description of Artificial Sequence: Synthetic polypeptide"
KAQLSGPVPTSKPTTTGKGCHIGRFKSLSPQELASFKKARDALEESLKLKNWSCSSPVFPGNWDLRLLQVRERPVALEAELALTLKVLEAAAGPALEDVLDQPLHTLHHILSQLQACIQPQPTAGPRPRGRLHHWLHRLQEAPKKESAGCLEASVTFNLFRLLTRDLKYVADGNLCLRTSTHPESTVGYMH

SEQ ID NO: 3226 - protein, 7 aa, Artificial Sequence
  source: /note="Description of Artificial Sequence: Synthetic peptide"
DTSKLAS

SEQ ID NO: 3227 - protein, 9 aa, Artificial Sequence
  source: /note="Description of Artificial Sequence: Synthetic peptide"
FQGSGYPFT

SEQ ID NO: 3228 - protein, 187 aa, Artificial Sequence
  source: /note="Description of Artificial Sequence: Synthetic polypeptide"
QLSGPVPTSKPTTTGKGCHIGRFKSLSPQELASFKKARDALEESLKLKNWSCSSPVFPGNWDLRLLQVRERPVALEAELALTLKVLEAAAGPALEDVLDQPLHTLHHILSQLQACIQPQPTAGPRPRGRLHHWLHRLQEAPKKESAGCLEASVTFNLFRLLTRDLKYVADGNLCLRTSTHPESTVGY

SEQ ID NO: 3229 - protein, 3 aa, Artificial Sequence
  source: /note="Description of Artificial Sequence: Synthetic peptide"
DTS

SEQ ID NO: 3230 - protein, 6 aa, Artificial Sequence
  source: /note="Description of Artificial Sequence: Synthetic peptide"
GSGYPF

SEQ ID NO: 3231 - protein, 287 aa, Artificial Sequence
  source: /note="Description of Artificial Sequence: Synthetic polypeptide"
DIQMTQSPSTLSASVGDRVTITCKAQLSGPVPTSKPTTTGKGCHIGRFKSLSPQELASFKKARDALEESLKLKNWSCSSPVFPGNWDLRLLQVRERPVALEAELALTLKVLEAAAGPALEDVLDQPLHTLHHILSQLQACIQPQPTAGPRPRGRLHHWLHRLQEAPKKESAGCLEASVTFNLFRLLTRDLKYVADGNLCLRTSTHPESTVGYMHWYQQKPGKAPKLLIYDTSKLASGVPSRFSGSGSGTEFTLTISSLQPDDFATYYCFQGSGYPFTFGGGTKLEIK

SEQ ID NO: 3232 - protein, 394 aa, Artificial Sequence
  source: /note="Description of Artificial Sequence: Synthetic polypeptide"
DIQMTQSPSTLSASVGDRVTITCKAQLSGPVPTSKPTTTGKGCHIGRFKSLSPQELASFKKARDALEESLKLKNWSCSSPVFPGNWDLRLLQVRERPVALEAELALTLKVLEAAAGPALEDVLDQPLHTLHHILSQLQACIQPQPTAGPRPRGRLHHWLHRLQEAPKKESAGCLEASVTFNLFRLLTRDLKYVADGNLCLRTSTHPESTVGYMHWYQQKPGKAPKLLIYDTSKLASGVPSRFSGSGSGTEFTLTISSLQPDDFATYYCFQGSGYPFTFGGGTKLEIKRTVAAPSVFIFPPSDEQLKSGTASVVCLLNNFYPREAKVQWKVDNALQSGNSQESVTEQDSKDSTYSLSSTLTLSKADYEKHKVYACEVTHQGLSSPVTKSFNRGEC

SEQ ID NO: 3233 - protein, 7 aa, Artificial Sequence
  source: /note="Description of Artificial Sequence: Synthetic peptide"
TSGMSVG

SEQ ID NO: 3234 - protein, 15 aa, Artificial Sequence
  source: /note="Description of Artificial Sequence: Synthetic peptide"
DIWWDDKKDYNPSLK

SEQ ID NO: 3235 - protein, 10 aa, Artificial Sequence
  source: /note="Description of Artificial Sequence: Synthetic peptide"
SMITNWYFDV

SEQ ID NO: 3236 - protein, 9 aa, Artificial Sequence
  source: /note="Description of Artificial Sequence: Synthetic peptide"
GFSLSTSGM

SEQ ID NO: 3237 - protein, 5 aa, Artificial Sequence
  source: /note="Description of Artificial Sequence: Synthetic peptide"
WWDDK

SEQ ID NO: 3238 - protein, 10 aa, Artificial Sequence
  source: /note="Description of Artificial Sequence: Synthetic peptide"
SMITNWYFDV

SEQ ID NO: 3239 - protein, 120 aa, Artificial Sequence; identical to SEQ ID NO: 55
  source: /note="Description of Artificial Sequence: Synthetic polypeptide"

SEQ ID NO: 3240 - protein, 450 aa, Artificial Sequence; identical to SEQ ID NO: 56
  source: /note="Description of Artificial Sequence: Synthetic polypeptide"

SEQ ID NO: 3241 - protein, 10 aa, Artificial Sequence
  source: /note="Description of Artificial Sequence: Synthetic peptide"
KAQLSVGYMH

SEQ ID NO: 3242 - protein, 188 aa, Artificial Sequence
  source: /note="Description of Artificial Sequence: Synthetic polypeptide"
DTGPVPTSKPTTTGKGCHIGRFKSLSPQELASFKKARDALEESLKLKNWSCSSPVFPGNWDLRLLQVRERPVALEAELALTLKVLEAAAGPALEDVLDQPLHTLHHILSQLQACIQPQPTAGPRPRGRLHHWLHRLQEAPKKESAGCLEASVTFNLFRLLTRDLKYVADGNLCLRTSTHPESTSKLAS

SEQ ID NO: 3243 - protein, 9 aa, Artificial Sequence
  source: /note="Description of Artificial Sequence: Synthetic peptide"
FQGSGYPFT

SEQ ID NO: 3244 - protein, 6 aa, Artificial Sequence
  source: /note="Description of Artificial Sequence: Synthetic peptide"
QLSVGY

SEQ ID NO: 3245 - protein, 184 aa, Artificial Sequence
  source: /note="Description of Artificial Sequence: Synthetic polypeptide"
DTGPVPTSKPTTTGKGCHIGRFKSLSPQELASFKKARDALEESLKLKNWSCSSPVFPGNWDLRLLQVRERPVALEAELALTLKVLEAAAGPALEDVLDQPLHTLHHILSQLQACIQPQPTAGPRPRGRLHHWLHRLQEAPKKESAGCLEASVTFNLFRLLTRDLKYVADGNLCLRTSTHPESTS

SEQ ID NO: 3246 - protein, 6 aa, Artificial Sequence
  source: /note="Description of Artificial Sequence: Synthetic peptide"
GSGYPF

SEQ ID NO: 3247 - protein, 287 aa, Artificial Sequence
  source: /note="Description of Artificial Sequence: Synthetic polypeptide"
DIQMTQSPSTLSASVGDRVTITCKAQLSVGYMHWYQQKPGKAPKLLIYDTGPVPTSKPTTTGKGCHIGRFKSLSPQELASFKKARDALEESLKLKNWSCSSPVFPGNWDLRLLQVRERPVALEAELALTLKVLEAAAGPALEDVLDQPLHTLHHILSQLQACIQPQPTAGPRPRGRLHHWLHRLQEAPKKESAGCLEASVTFNLFRLLTRDLKYVADGNLCLRTSTHPESTSKLASGVPSRFSGSGSGTEFTLTISSLQPDDFATYYCFQGSGYPFTFGGGTKLEIK

SEQ ID NO: 3248 - protein, 394 aa, Artificial Sequence
  source: /note="Description of Artificial Sequence: Synthetic polypeptide"
DIQMTQSPSTLSASVGDRVTITCKAQLSVGYMHWYQQKPGKAPKLLIYDTGPVPTSKPTTTGKGCHIGRFKSLSPQELASFKKARDALEESLKLKNWSCSSPVFPGNWDLRLLQVRERPVALEAELALTLKVLEAAAGPALEDVLDQPLHTLHHILSQLQACIQPQPTAGPRPRGRLHHWLHRLQEAPKKESAGCLEASVTFNLFRLLTRDLKYVADGNLCLRTSTHPESTSKLASGVPSRFSGSGSGTEFTLTISSLQPDDFATYYCFQGSGYPFTFGGGTKLEIKRTVAAPSVFIFPPSDEQLKSGTASVVCLLNNFYPREAKVQWKVDNALQSGNSQESVTEQDSKDSTYSLSSTLTLSKADYEKHKVYACEVTHQGLSSPVTKSFNRGEC

SEQ ID NO: 3249 - protein, 7 aa, Artificial Sequence
  source: /note="Description of Artificial Sequence: Synthetic peptide"
TSGMSVG

SEQ ID NO: 3250 - protein, 15 aa, Artificial Sequence
  source: /note="Description of Artificial Sequence: Synthetic peptide"
DIWWDDKKDYNPSLK

SEQ ID NO: 3251 - protein, 10 aa, Artificial Sequence
  source: /note="Description of Artificial Sequence: Synthetic peptide"
SMITNWYFDV

SEQ ID NO: 3252 - protein, 9 aa, Artificial Sequence
  source: /note="Description of Artificial Sequence: Synthetic peptide"
GFSLSTSGM

SEQ ID NO: 3253 - protein, 5 aa, Artificial Sequence
  source: /note="Description of Artificial Sequence: Synthetic peptide"
WWDDK

SEQ ID NO: 3254 - protein, 10 aa, Artificial Sequence
  source: /note="Description of Artificial Sequence: Synthetic peptide"
SMITNWYFDV

SEQ ID NO: 3255 - protein, 120 aa, Artificial Sequence; identical to SEQ ID NO: 55
  source: /note="Description of Artificial Sequence: Synthetic polypeptide"

SEQ ID NO: 3256 - protein, 450 aa, Artificial Sequence; identical to SEQ ID NO: 56
  source: /note="Description of Artificial Sequence: Synthetic polypeptide"

SEQ ID NO: 3257 - protein, 10 aa, Artificial Sequence
  source: /note="Description of Artificial Sequence: Synthetic peptide"
KAQLSVGYMH

SEQ ID NO: 3258 - protein, 7 aa, Artificial Sequence
  source: /note="Description of Artificial Sequence: Synthetic peptide"
DTSKLAS

SEQ ID NO: 3259 - protein, 190 aa, Artificial Sequence
  source: /note="Description of Artificial Sequence: Synthetic polypeptide"
FQGSGGPVPTSKPTTTGKGCHIGRFKSLSPQELASFKKARDALEESLKLKNWSCSSPVFPGNWDLRLLQVRERPVALEAELALTLKVLEAAAGPALEDVLDQPLHTLHHILSQLQACIQPQPTAGPRPRGRLHHWLHRLQEAPKKESAGCLEASVTFNLFRLLTRDLKYVADGNLCLRTSTHPESTYPFT

SEQ ID NO: 3260 - protein, 6 aa, Artificial Sequence
  source: /note="Description of Artificial Sequence: Synthetic peptide"
QLSVGY

SEQ ID NO: 3261 - protein, 3 aa, Artificial Sequence
  source: /note="Description of Artificial Sequence: Synthetic peptide"
DTS

SEQ ID NO: 3262 - protein, 187 aa, Artificial Sequence
  source: /note="Description of Artificial Sequence: Synthetic polypeptide"
GSGGPVPTSKPTTTGKGCHIGRFKSLSPQELASFKKARDALEESLKLKNWSCSSPVFPGNWDLRLLQVRERPVALEAELALTLKVLEAAAGPALEDVLDQPLHTLHHILSQLQACIQPQPTAGPRPRGRLHHWLHRLQEAPKKESAGCLEASVTFNLFRLLTRDLKYVADGNLCLRTSTHPESTYPF

SEQ ID NO: 3263 - protein, 287 aa, Artificial Sequence
  source: /note="Description of Artificial Sequence: Synthetic polypeptide"
DIQMTQSPSTLSASVGDRVTITCKAQLSVGYMHWYQQKPGKAPKLLIYDTSKLASGVPSRFSGSGSGTEFTLTISSLQPDDFATYYCFQGSGGPVPTSKPTTTGKGCHIGRFKSLSPQELASFKKARDALEESLKLKNWSCSSPVFPGNWDLRLLQVRERPVALEAELALTLKVLEAAAGPALEDVLDQPLHTLHHILSQLQACIQPQPTAGPRPRGRLHHWLHRLQEAPKKESAGCLEASVTFNLFRLLTRDLKYVADGNLCLRTSTHPESTYPFTFGGGTKLEIK

SEQ ID NO: 3264 - protein, 394 aa, Artificial Sequence
  source: /note="Description of Artificial Sequence: Synthetic polypeptide"
DIQMTQSPSTLSASVGDRVTITCKAQLSVGYMHWYQQKPGKAPKLLIYDTSKLASGVPSRFSGSGSGTEFTLTISSLQPDDFATYYCFQGSGGPVPTSKPTTTGKGCHIGRFKSLSPQELASFKKARDALEESLKLKNWSCSSPVFPGNWDLRLLQVRERPVALEAELALTLKVLEAAAGPALEDVLDQPLHTLHHILSQLQACIQPQPTAGPRPRGRLHHWLHRLQEAPKKESAGCLEASVTFNLFRLLTRDLKYVADGNLCLRTSTHPESTYPFTFGGGTKLEIKRTVAAPSVFIFPPSDEQLKSGTASVVCLLNNFYPREAKVQWKVDNALQSGNSQESVTEQDSKDSTYSLSSTLTLSKADYEKHKVYACEVTHQGLSSPVTKSFNRGEC

SEQ ID NO: 3265 - protein, 182 aa, Artificial Sequence
  source: /note="Description of Artificial Sequence: Synthetic polypeptide"
PVARLHGALPDARGCHIAQFKSLSPQELQAFKRAKDALEESLLLKDCRCHSRLFPRTWDLRQLQVRERPMALEAELALTLKVLEATADTDPALVDVLDQPLHTLHHILSQFRACIQPQPTAGPRTRGRLHHWLYRLQEAPKKESPGCLEASVTFNLFRLLTRDLNCVASGDLCVSTSGMSVG

SEQ ID NO: 3266 - protein, 16 aa, Artificial Sequence
  source: /note="Description of Artificial Sequence: Synthetic peptide"
DIWWDDKKDYNPSLKS

SEQ ID NO: 3267 - protein, 10 aa, Artificial Sequence
  source: /note="Description of Artificial Sequence: Synthetic peptide"
SMITNWYFDV

SEQ ID NO: 3268 - protein, 184 aa, Artificial Sequence
  source: /note="Description of Artificial Sequence: Synthetic polypeptide"
GFSLVPVARLHGALPDARGCHIAQFKSLSPQELQAFKRAKDALEESLLLKDCRCHSRLFPRTWDLRQLQVRERPMALEAELALTLKVLEATADTDPALVDVLDQPLHTLHHILSQFRACIQPQPTAGPRTRGRLHHWLYRLQEAPKKESPGCLEASVTFNLFRLLTRDLNCVASGDLCVSTSGM

SEQ ID NO: 3269 - protein, 5 aa, Artificial Sequence
  source: /note="Description of Artificial Sequence: Synthetic peptide"
WWDDK

SEQ ID NO: 3270 - protein, 10 aa, Artificial Sequence
  source: /note="Description of Artificial Sequence: Synthetic peptide"
SMITNWYFDV

SEQ ID NO: 3271 - protein, 295 aa, Artificial Sequence
  source: /note="Description of Artificial Sequence: Synthetic polypeptide"
QVTLRESGPALVKPTQTLTLTCTFSGFSLVPVARLHGALPDARGCHIAQFKSLSPQELQAFKRAKDALEESLLLKDCRCHSRLFPRTWDLRQLQVRERPMALEAELALTLKVLEATADTDPALVDVLDQPLHTLHHILSQFRACIQPQPTAGPRTRGRLHHWLYRLQEAPKKESPGCLEASVTFNLFRLLTRDLNCVASGDLCVSTSGMSVGWIRQPPGKALEWLADIWWDDKKDYNPSLKSRLTISKDTSKNQVVLKVTNMDPADTATYYCARSMITNWYFDVWGAGTTVTVSS

SEQ ID NO: 3272 - protein, 625 aa, Artificial Sequence
  source: /note="Description of Artificial Sequence: Synthetic polypeptide"
QVTLRESGPALVKPTQTLTLTCTFSGFSLVPVARLHGALPDARGCHIAQFKSLSPQELQAFKRAKDALEESLLLKDCRCHSRLFPRTWDLRQLQVRERPMALEAELALTLKVLEATADTDPALVDVLDQPLHTLHHILSQFRACIQPQPTAGPRTRGRLHHWLYRLQEAPKKESPGCLEASVTFNLFRLLTRDLNCVASGDLCVSTSGMSVGWIRQPPGKALEWLADIWWDDKKDYNPSLKSRLTISKDTSKNQVVLKVTNMDPADTATYYCARSMITNWYFDVWGAGTTVTVSSASTKGPSVFPLAPSSKSTSGGTAALGCLVKDYFPEPVTVSWNSGALTSGVHTFPAVLQSSGLYSLSSVVTVPSSSLGTQTYICNVNHKPSNTKVDKRVEPKSCDKTHTCPPCPAPELLGGPSVFLFPPKPKDTLMISRTPEVTCVVVAVSHEDPEVKFNWYVDGVEVHNAKTKPREEQYNSTYRVVSVLTVLHQDWLNGKEYKCKVSNKALAAPIEKTISKAKGQPREPQVYTLPPSREEMTKNQVSLTCLVKGFYPSDIAVEWESNGQPENNYKTTPPVLDSDGSFFLYSKLTVDKSRWQQGNVFSCSVMHEALHNHYTQKSLSLSPGK

SEQ ID NO: 3273 - protein, 10 aa, Artificial Sequence
  source: /note="Description of Artificial Sequence: Synthetic peptide"
KAQLSVGYMH

SEQ ID NO: 3274 - protein, 7 aa, Artificial Sequence
  source: /note="Description of Artificial Sequence: Synthetic peptide"
DTSKLAS

SEQ ID NO: 3275 - protein, 9 aa, Artificial Sequence
  source: /note="Description of Artificial Sequence: Synthetic peptide"
FQGSGYPFT

SEQ ID NO: 3276 - protein, 6 aa, Artificial Sequence
  source: /note="Description of Artificial Sequence: Synthetic peptide"
QLSVGY

SEQ ID NO: 3277 - protein, 3 aa, Artificial Sequence
  source: /note="Description of Artificial Sequence: Synthetic peptide"
DTS

SEQ ID NO: 3278 - protein, 6 aa, Artificial Sequence
  source: /note="Description of Artificial Sequence: Synthetic peptide"
GSGYPF

SEQ ID NO: 3279 - protein, 106 aa, Artificial Sequence; identical to SEQ ID NO: 15
  source: /note="Description of Artificial Sequence: Synthetic polypeptide"

SEQ ID NO: 3280 - protein, 213 aa, Artificial Sequence; identical to SEQ ID NO: 16
  source: /note="Description of Artificial Sequence: Synthetic polypeptide"

SEQ ID NO: 3281 - protein, 7 aa, Artificial Sequence
  source: /note="Description of Artificial Sequence: Synthetic peptide"
TSGMSVG

SEQ ID NO: 3282 - protein, 191 aa, Artificial Sequence
  source: /note="Description of Artificial Sequence: Synthetic polypeptide"
DIWWDVPVARLHGALPDARGCHIAQFKSLSPQELQAFKRAKDALEESLLLKDCRCHSRLFPRTWDLRQLQVRERPMALEAELALTLKVLEATADTDPALVDVLDQPLHTLHHILSQFRACIQPQPTAGPRTRGRLHHWLYRLQEAPKKESPGCLEASVTFNLFRLLTRDLNCVASGDLCVDKKDYNPSLKS

SEQ ID NO: 3283 - protein, 10 aa, Artificial Sequence
  source: /note="Description of Artificial Sequence: Synthetic peptide"
SMITNWYFDV

SEQ ID NO: 3284 - protein, 9 aa, Artificial Sequence
  source: /note="Description of Artificial Sequence: Synthetic peptide"
GFSLSTSGM

SEQ ID NO: 3285 - protein, 180 aa, Artificial Sequence
  source: /note="Description of Artificial Sequence: Synthetic polypeptide"
WWDVPVARLHGALPDARGCHIAQFKSLSPQELQAFKRAKDALEESLLLKDCRCHSRLFPRTWDLRQLQVRERPMALEAELALTLKVLEATADTDPALVDVLDQPLHTLHHILSQFRACIQPQPTAGPRTRGRLHHWLYRLQEAPKKESPGCLEASVTFNLFRLLTRDLNCVASGDLCVDK

SEQ ID NO: 3286 - protein, 10 aa, Artificial Sequence
  source: /note="Description of Artificial Sequence: Synthetic peptide"
SMITNWYFDV

SEQ ID NO: 3287 - protein, 295 aa, Artificial Sequence
  source: /note="Description of Artificial Sequence: Synthetic polypeptide"
QVTLRESGPALVKPTQTLTLTCTFSGFSLSTSGMSVGWIRQPPGKALEWLADIWWDVPVARLHGALPDARGCHIAQFKSLSPQELQAFKRAKDALEESLLLKDCRCHSRLFPRTWDLRQLQVRERPMALEAELALTLKVLEATADTDPALVDVLDQPLHTLHHILSQFRACIQPQPTAGPRTRGRLHHWLYRLQEAPKKESPGCLEASVTFNLFRLLTRDLNCVASGDLCVDKKDYNPSLKSRLTISKDTSKNQVVLKVTNMDPADTATYYCARSMITNWYFDVWGAGTTVTVSS

SEQ ID NO: 3288 - protein, 625 aa, Artificial Sequence
  source: /note="Description of Artificial Sequence: Synthetic polypeptide"
QVTLRESGPALVKPTQTLTLTCTFSGFSLSTSGMSVGWIRQPPGKALEWLADIWWDVPVARLHGALPDARGCHIAQFKSLSPQELQAFKRAKDALEESLLLKDCRCHSRLFPRTWDLRQLQVRERPMALEAELALTLKVLEATADTDPALVDVLDQPLHTLHHILSQFRACIQPQPTAGPRTRGRLHHWLYRLQEAPKKESPGCLEASVTFNLFRLLTRDLNCVASGDLCVDKKDYNPSLKSRLTISKDTSKNQVVLKVTNMDPADTATYYCARSMITNWYFDVWGAGTTVTVSSASTKGPSVFPLAPSSKSTSGGTAALGCLVKDYFPEPVTVSWNSGALTSGVHTFPAVLQSSGLYSLSSVVTVPSSSLGTQTYICNVNHKPSNTKVDKRVEPKSCDKTHTCPPCPAPELLGGPSVFLFPPKPKDTLMISRTPEVTCVVVAVSHEDPEVKFNWYVDGVEVHNAKTKPREEQYNSTYRVVSVLTVLHQDWLNGKEYKCKVSNKALAAPIEKTISKAKGQPREPQVYTLPPSREEMTKNQVSLTCLVKGFYPSDIAVEWESNGQPENNYKTTPPVLDSDGSFFLYSKLTVDKSRWQQGNVFSCSVMHEALHNHYTQKSLSLSPGK

SEQ ID NO: 3289 - protein, 10 aa, Artificial Sequence
  source: /note="Description of Artificial Sequence: Synthetic peptide"
KAQLSVGYMH

SEQ ID NO: 3290 - protein, 7 aa, Artificial Sequence
  source: /note="Description of Artificial Sequence: Synthetic peptide"
DTSKLAS

SEQ ID NO: 3291 - protein, 9 aa, Artificial Sequence
  source: /note="Description of Artificial Sequence: Synthetic peptide"
FQGSGYPFT

SEQ ID NO: 3292 - protein, 6 aa, Artificial Sequence
  source: /note="Description of Artificial Sequence: Synthetic peptide"
QLSVGY

SEQ ID NO: 3293 - protein, 3 aa, Artificial Sequence
  source: /note="Description of Artificial Sequence: Synthetic peptide"
DTS

SEQ ID NO: 3294 - protein, 6 aa, Artificial Sequence
  source: /note="Description of Artificial Sequence: Synthetic peptide"
GSGYPF

SEQ ID NO: 3295 - protein, 106 aa, Artificial Sequence; identical to SEQ ID NO: 15
  source: /note="Description of Artificial Sequence: Synthetic polypeptide"

SEQ ID NO: 3296 - protein, 213 aa, Artificial Sequence; identical to SEQ ID NO: 16
  source: /note="Description of Artificial Sequence: Synthetic polypeptide"

SEQ ID NO: 3297 - protein, 7 aa, Artificial Sequence
  source: /note="Description of Artificial Sequence: Synthetic peptide"
TSGMSVG

SEQ ID NO: 3298 - protein, 16 aa, Artificial Sequence
  source: /note="Description of Artificial Sequence: Synthetic peptide"
DIWWDDKKDYNPSLKS

SEQ ID NO: 3299 - protein, 185 aa, Artificial Sequence
  source: /note="Description of Artificial Sequence: Synthetic polypeptide"
SMITVPVARLHGALPDARGCHIAQFKSLSPQELQAFKRAKDALEESLLLKDCRCHSRLFPRTWDLRQLQVRERPMALEAELALTLKVLEATADTDPALVDVLDQPLHTLHHILSQFRACIQPQPTAGPRTRGRLHHWLYRLQEAPKKESPGCLEASVTFNLFRLLTRDLNCVASGDLCVNWYFDV

SEQ ID NO: 3300 - protein, 9 aa, Artificial Sequence
  source: /note="Description of Artificial Sequence: Synthetic peptide"
GFSLSTSGM

SEQ ID NO: 3301 - protein, 5 aa, Artificial Sequence
  source: /note="Description of Artificial Sequence: Synthetic peptide"
WWDDK

SEQ ID NO: 3302 - protein, 185 aa, Artificial Sequence; identical to SEQ ID NO: 3299
  source: /note="Description of Artificial Sequence: Synthetic polypeptide"

SEQ ID NO: 3303 - protein, 295 aa, Artificial Sequence
  source: /note="Description of Artificial Sequence: Synthetic polypeptide"
QVTLRESGPALVKPTQTLTLTCTFSGFSLSTSGMSVGWIRQPPGKALEWLADIWWDDKKDYNPSLKSRLTISKDTSKNQVVLKVTNMDPADTATYYCARSMITVPVARLHGALPDARGCHIAQFKSLSPQELQAFKRAKDALEESLLLKDCRCHSRLFPRTWDLRQLQVRERPMALEAELALTLKVLEATADTDPALVDVLDQPLHTLHHILSQFRACIQPQPTAGPRTRGRLHHWLYRLQEAPKKESPGCLEASVTFNLFRLLTRDLNCVASGDLCVNWYFDVWGAGTTVTVSS

SEQ ID NO: 3304 - protein, 625 aa, Artificial Sequence
  source: /note="Description of Artificial Sequence: Synthetic polypeptide"
QVTLRESGPALVKPTQTLTLTCTFSGFSLSTSGMSVGWIRQPPGKALEWLADIWWDDKKDYNPSLKSRLTISKDTSKNQVVLKVTNMDPADTATYYCARSMITVPVARLHGALPDARGCHIAQFKSLSPQELQAFKRAKDALEESLLLKDCRCHSRLFPRTWDLRQLQVRERPMALEAELALTLKVLEATADTDPALVDVLDQPLHTLHHILSQFRACIQPQPTAGPRTRGRLHHWLYRLQEAPKKESPGCLEASVTFNLFRLLTRDLNCVASGDLCVNWYFDVWGAGTTVTVSSASTKGPSVFPLAPSSKSTSGGTAALGCLVKDYFPEPVTVSWNSGALTSGVHTFPAVLQSSGLYSLSSVVTVPSSSLGTQTYICNVNHKPSNTKVDKRVEPKSCDKTHTCPPCPAPELLGGPSVFLFPPKPKDTLMISRTPEVTCVVVAVSHEDPEVKFNWYVDGVEVHNAKTKPREEQYNSTYRVVSVLTVLHQDWLNGKEYKCKVSNKALAAPIEKTISKAKGQPREPQVYTLPPSREEMTKNQVSLTCLVKGFYPSDIAVEWESNGQPENNYKTTPPVLDSDGSFFLYSKLTVDKSRWQQGNVFSCSVMHEALHNHYTQKSLSLSPGK

SEQ ID NO: 3305 - protein, 10 aa, Artificial Sequence
  source: /note="Description of Artificial Sequence: Synthetic peptide"
KAQLSVGYMH

SEQ ID NO: 3306 - protein, 7 aa, Artificial Sequence
  source: /note="Description of Artificial Sequence: Synthetic peptide"
DTSKLAS

SEQ ID NO: 3307 - protein, 9 aa, Artificial Sequence
  source: /note="Description of Artificial Sequence: Synthetic peptide"
FQGSGYPFT

SEQ ID NO: 3308 - protein, 6 aa, Artificial Sequence
  source: /note="Description of Artificial Sequence: Synthetic peptide"
QLSVGY

SEQ ID NO: 3309 - protein, 3 aa, Artificial Sequence
  source: /note="Description of Artificial Sequence: Synthetic peptide"
DTS

SEQ ID NO: 3310 - protein, 6 aa, Artificial Sequence
  source: /note="Description of Artificial Sequence: Synthetic peptide"
GSGYPF

SEQ ID NO: 3311 - protein, 106 aa, Artificial Sequence; identical to SEQ ID NO: 15
  source: /note="Description of Artificial Sequence: Synthetic polypeptide"

SEQ ID NO: 3312 - protein, 213 aa, Artificial Sequence; identical to SEQ ID NO: 16
  source: /note="Description of Artificial Sequence: Synthetic polypeptide"

SEQ ID NO: 3313 - protein, 7 aa, Artificial Sequence
  source: /note="Description of Artificial Sequence: Synthetic peptide"
TSGMSVG

SEQ ID NO: 3314 - protein, 15 aa, Artificial Sequence
  source: /note="Description of Artificial Sequence: Synthetic peptide"
DIWWDDKKDYNPSLK

SEQ ID NO: 3315 - protein, 10 aa, Artificial Sequence
  source: /note="Description of Artificial Sequence: Synthetic peptide"
SMITNWYFDV

SEQ ID NO: 3316 - protein, 9 aa, Artificial Sequence
  source: /note="Description of Artificial Sequence: Synthetic peptide"
GFSLSTSGM

SEQ ID NO: 3317 - protein, 5 aa, Artificial Sequence
  source: /note="Description of Artificial Sequence: Synthetic peptide"
WWDDK

SEQ ID NO: 3318 - protein, 10 aa, Artificial Sequence
  source: /note="Description of Artificial Sequence: Synthetic peptide"
SMITNWYFDV

SEQ ID NO: 3319 - protein, 120 aa, Artificial Sequence; identical to SEQ ID NO: 55
  source: /note="Description of Artificial Sequence: Synthetic polypeptide"

SEQ ID NO: 3320 - protein, 450 aa, Artificial Sequence; identical to SEQ ID NO: 56
  source: /note="Description of Artificial Sequence: Synthetic polypeptide"

SEQ ID NO: 3321 - protein, 185 aa, Artificial Sequence
  source: /note="Description of Artificial Sequence: Synthetic polypeptide"
KAQLSVPVARLHGALPDARGCHIAQFKSLSPQELQAFKRAKDALEESLLLKDCRCHSRLFPRTWDLRQLQVRERPMALEAELALTLKVLEATADTDPALVDVLDQPLHTLHHILSQFRACIQPQPTAGPRTRGRLHHWLYRLQEAPKKESPGCLEASVTFNLFRLLTRDLNCVASGDLCVVGYMH

SEQ ID NO: 3322 - protein, 7 aa, Artificial Sequence
  source: /note="Description of Artificial Sequence: Synthetic peptide"
DTSKLAS

SEQ ID NO: 3323 - protein, 9 aa, Artificial Sequence
  source: /note="Description of Artificial Sequence: Synthetic peptide"
FQGSGYPFT

SEQ ID NO: 3324 - protein, 181 aa, Artificial Sequence
  source: /note="Description of Artificial Sequence: Synthetic polypeptide"
QLSVPVARLHGALPDARGCHIAQFKSLSPQELQAFKRAKDALEESLLLKDCRCHSRLFPRTWDLRQLQVRERPMALEAELALTLKVLEATADTDPALVDVLDQPLHTLHHILSQFRACIQPQPTAGPRTRGRLHHWLYRLQEAPKKESPGCLEASVTFNLFRLLTRDLNCVASGDLCVVGY

SEQ ID NO: 3325 - protein, 3 aa, Artificial Sequence
  source: /note="Description of Artificial Sequence: Synthetic peptide"
DTS

SEQ ID NO: 3326 - protein, 6 aa, Artificial Sequence
  source: /note="Description of Artificial Sequence: Synthetic peptide"
GSGYPF

SEQ ID NO: 3327 - protein, 281 aa, Artificial Sequence
  source: /note="Description of Artificial Sequence: Synthetic polypeptide"
DIQMTQSPSTLSASVGDRVTITCKAQLSVPVARLHGALPDARGCHIAQFKSLSPQELQAFKRAKDALEESLLLKDCRCHSRLFPRTWDLRQLQVRERPMALEAELALTLKVLEATADTDPALVDVLDQPLHTLHHILSQFRACIQPQPTAGPRTRGRLHHWLYRLQEAPKKESPGCLEASVTFNLFRLLTRDLNCVASGDLCVVGYMHWYQQKPGKAPKLLIYDTSKLASGVPSRFSGSGSGTEFTLTISSLQPDDFATYYCFQGSGYPFTFGGGTKLEIK

SEQ ID NO: 3328 - protein, 388 aa, Artificial Sequence
  source: /note="Description of Artificial Sequence: Synthetic polypeptide"
DIQMTQSPSTLSASVGDRVTITCKAQLSVPVARLHGALPDARGCHIAQFKSLSPQELQAFKRAKDALEESLLLKDCRCHSRLFPRTWDLRQLQVRERPMALEAELALTLKVLEATADTDPALVDVLDQPLHTLHHILSQFRACIQPQPTAGPRTRGRLHHWLYRLQEAPKKESPGCLEASVTFNLFRLLTRDLNCVASGDLCVVGYMHWYQQKPGKAPKLLIYDTSKLASGVPSRFSGSGSGTEFTLTISSLQPDDFATYYCFQGSGYPFTFGGGTKLEIKRTVAAPSVFIFPPSDEQLKSGTASVVCLLNNFYPREAKVQWKVDNALQSGNSQESVTEQDSKDSTYSLSSTLTLSKADYEKHKVYACEVTHQGLSSPVTKSFNRGEC

SEQ ID NO: 3329 - protein, 7 aa, Artificial Sequence
  source: /note="Description of Artificial Sequence: Synthetic peptide"
TSGMSVG

SEQ ID NO: 3330 - protein, 15 aa, Artificial Sequence
  source: /note="Description of Artificial Sequence: Synthetic peptide"
DIWWDDKKDYNPSLK

SEQ ID NO: 3331 - protein, 10 aa, Artificial Sequence
  source: /note="Description of Artificial Sequence: Synthetic peptide"
SMITNWYFDV

SEQ ID NO: 3332 - protein, 9 aa, Artificial Sequence
  source: /note="Description of Artificial Sequence: Synthetic peptide"
GFSLSTSGM

SEQ ID NO: 3333 - protein, 5 aa, Artificial Sequence
  source: /note="Description of Artificial Sequence: Synthetic peptide"
WWDDK

SEQ ID NO: 3334 - protein, 10 aa, Artificial Sequence
  source: /note="Description of Artificial Sequence: Synthetic peptide"
SMITNWYFDV

SEQ ID NO: 3335 - protein, 120 aa, Artificial Sequence; identical to SEQ ID NO: 55
  source: /note="Description of Artificial Sequence: Synthetic polypeptide"

SEQ ID NO: 3336 - protein, 450 aa, Artificial Sequence; identical to SEQ ID NO: 56
  source: /note="Description of Artificial Sequence: Synthetic polypeptide"

SEQ ID NO: 3337 - protein, 10 aa, Artificial Sequence
  source: /note="Description of Artificial Sequence: Synthetic peptide"
KAQLSVGYMH

SEQ ID NO: 3338 - protein, 182 aa, Artificial Sequence
  source: /note="Description of Artificial Sequence: Synthetic polypeptide"
DTVPVARLHGALPDARGCHIAQFKSLSPQELQAFKRAKDALEESLLLKDCRCHSRLFPRTWDLRQLQVRERPMALEAELALTLKVLEATADTDPALVDVLDQPLHTLHHILSQFRACIQPQPTAGPRTRGRLHHWLYRLQEAPKKESPGCLEASVTFNLFRLLTRDLNCVASGDLCVSKLAS

SEQ ID NO: 3339 - protein, 9 aa, Artificial Sequence
  source: /note="Description of Artificial Sequence: Synthetic peptide"
FQGSGYPFT

SEQ ID NO: 3340 - protein, 6 aa, Artificial Sequence
  source: /note="Description of Artificial Sequence: Synthetic peptide"
QLSVGY

SEQ ID NO: 3341 - protein, 178 aa, Artificial Sequence
  source: /note="Description of Artificial Sequence: Synthetic polypeptide"
DTVPVARLHGALPDARGCHIAQFKSLSPQELQAFKRAKDALEESLLLKDCRCHSRLFPRTWDLRQLQVRERPMALEAELALTLKVLEATADTDPALVDVLDQPLHTLHHILSQFRACIQPQPTAGPRTRGRLHHWLYRLQEAPKKESPGCLEASVTFNLFRLLTRDLNCVASGDLCVS

SEQ ID NO: 3342 - protein, 6 aa, Artificial Sequence
  source: /note="Description of Artificial Sequence: Synthetic peptide"
GSGYPF

SEQ ID NO: 3343 - protein, 281 aa, Artificial Sequence
  source: /note="Description of Artificial Sequence: Synthetic polypeptide"
DIQMTQSPSTLSASVGDRVTITCKAQLSVGYMHWYQQKPGKAPKLLIYDTVPVARLHGALPDARGCHIAQFKSLSPQELQAFKRAKDALEESLLLKDCRCHSRLFPRTWDLRQLQVRERPMALEAELALTLKVLEATADTDPALVDVLDQPLHTLHHILSQFRACIQPQPTAGPRTRGRLHHWLYRLQEAPKKESPGCLEASVTFNLFRLLTRDLNCVASGDLCVSKLASGVPSRFSGSGSGTEFTLTISSLQPDDFATYYCFQGSGYPFTFGGGTKLEIK

SEQ ID NO: 3344 - protein, 388 aa, Artificial Sequence
  source: /note="Description of Artificial Sequence: Synthetic polypeptide"
DIQMTQSPSTLSASVGDRVTITCKAQLSVGYMHWYQQKPGKAPKLLIYDTVPVARLHGALPDARGCHIAQFKSLSPQELQAFKRAKDALEESLLLKDCRCHSRLFPRTWDLRQLQVRERPMALEAELALTLKVLEATADTDPALVDVLDQPLHTLHHILSQFRACIQPQPTAGPRTRGRLHHWLYRLQEAPKKESPGCLEASVTFNLFRLLTRDLNCVASGDLCVSKLASGVPSRFSGSGSGTEFTLTISSLQPDDFATYYCFQGSGYPFTFGGGTKLEIKRTVAAPSVFIFPPSDEQLKSGTASVVCLLNNFYPREAKVQWKVDNALQSGNSQESVTEQDSKDSTYSLSSTLTLSKADYEKHKVYACEVTHQGLSSPVTKSFNRGEC

SEQ ID NO: 3345 - protein, 7 aa, Artificial Sequence
  source: /note="Description of Artificial Sequence: Synthetic peptide"
TSGMSVG

SEQ ID NO: 3346 - protein, 15 aa, Artificial Sequence
  source: /note="Description of Artificial Sequence: Synthetic peptide"
DIWWDDKKDYNPSLK

SEQ ID NO: 3347 - protein, 10 aa, Artificial Sequence
  source: /note="Description of Artificial Sequence: Synthetic peptide"
SMITNWYFDV

SEQ ID NO: 3348 - protein, 9 aa, Artificial Sequence
  source: /note="Description of Artificial Sequence: Synthetic peptide"
GFSLSTSGM

SEQ ID NO: 3349 - protein, 5 aa, Artificial Sequence
  source: /note="Description of Artificial Sequence: Synthetic peptide"
WWDDK

SEQ ID NO: 3350 - protein, 10 aa, Artificial Sequence
  source: /note="Description of Artificial Sequence: Synthetic peptide"
SMITNWYFDV

SEQ ID NO: 3351 - protein, 120 aa, Artificial Sequence; identical to SEQ ID NO: 55
  source: /note="Description of Artificial Sequence: Synthetic polypeptide"

SEQ ID NO: 3352 - protein, 450 aa, Artificial Sequence; identical to SEQ ID NO: 56
  source: /note="Description of Artificial Sequence: Synthetic polypeptide"

SEQ ID NO: 3353 - protein, 10 aa, Artificial Sequence
  source: /note="Description of Artificial Sequence: Synthetic peptide"
KAQLSVGYMH

SEQ ID NO: 3354 - protein, 7 aa, Artificial Sequence
  source: /note="Description of Artificial Sequence: Synthetic peptide"
DTSKLAS

SEQ ID NO: 3355 - protein, 184 aa, Artificial Sequence
  source: /note="Description of Artificial Sequence: Synthetic polypeptide"
FQGSGVPVARLHGALPDARGCHIAQFKSLSPQELQAFKRAKDALEESLLLKDCRCHSRLFPRTWDLRQLQVRERPMALEAELALTLKVLEATADTDPALVDVLDQPLHTLHHILSQFRACIQPQPTAGPRTRGRLHHWLYRLQEAPKKESPGCLEASVTFNLFRLLTRDLNCVASGDLCVYPFT

SEQ ID NO: 3356 - protein, 6 aa, Artificial Sequence
  source: /note="Description of Artificial Sequence: Synthetic peptide"
QLSVGY

SEQ ID NO: 3357 - protein, 3 aa, Artificial Sequence
  source: /note="Description of Artificial Sequence: Synthetic peptide"
DTS

SEQ ID NO: 3358 - protein, 181 aa, Artificial Sequence
  source: /note="Description of Artificial Sequence: Synthetic polypeptide"
GSGVPVARLHGALPDARGCHIAQFKSLSPQELQAFKRAKDALEESLLLKDCRCHSRLFPRTWDLRQLQVRERPMALEAELALTLKVLEATADTDPALVDVLDQPLHTLHHILSQFRACIQPQPTAGPRTRGRLHHWLYRLQEAPKKESPGCLEASVTFNLFRLLTRDLNCVASGDLCVYPF

SEQ ID NO: 3359 - protein, 281 aa, Artificial Sequence
  source: /note="Description of Artificial Sequence: Synthetic polypeptide"
DIQMTQSPSTLSASVGDRVTITCKAQLSVGYMHWYQQKPGKAPKLLIYDTSKLASGVPSRFSGSGSGTEFTLTISSLQPDDFATYYCFQGSGVPVARLHGALPDARGCHIAQFKSLSPQELQAFKRAKDALEESLLLKDCRCHSRLFPRTWDLRQLQVRERPMALEAELALTLKVLEATADTDPALVDVLDQPLHTLHHILSQFRACIQPQPTAGPRTRGRLHHWLYRLQEAPKKESPGCLEASVTFNLFRLLTRDLNCVASGDLCVYPFTFGGGTKLEIK

SEQ ID NO: 3360 - protein, 388 aa, Artificial Sequence
  source: /note="Description of Artificial Sequence: Synthetic polypeptide"
DIQMTQSPSTLSASVGDRVTITCKAQLSVGYMHWYQQKPGKAPKLLIYDTSKLASGVPSRFSGSGSGTEFTLTISSLQPDDFATYYCFQGSGVPVARLHGALPDARGCHIAQFKSLSPQELQAFKRAKDALEESLLLKDCRCHSRLFPRTWDLRQLQVRERPMALEAELALTLKVLEATADTDPALVDVLDQPLHTLHHILSQFRACIQPQPTAGPRTRGRLHHWLYRLQEAPKKESPGCLEASVTFNLFRLLTRDLNCVASGDLCVYPFTFGGGTKLEIKRTVAAPSVFIFPPSDEQLKSGTASVVCLLNNFYPREAKVQWKVDNALQSGNSQESVTEQDSKDSTYSLSSTLTLSKADYEKHKVYACEVTHQGLSSPVTKSFNRGEC

SEQ ID NO: 3361 - protein, 145 aa, Artificial Sequence
  source: /note="Description of Artificial Sequence: Synthetic polypeptide"
GFSLAPTSSSTKKTQLQLEHLLLALQMILNGINNYKNPKLTRMLTFKFYMPKKATELKHLQCLEEELKPLEEVLNLAQSKNFHLRPRDLISNINVIVLELKGSETTFMCEYADETATIVEFLNRWITFCQSIISTLTSTSGMSVG

SEQ ID NO: 3362 - protein, 16 aa, Artificial Sequence
  source: /note="Description of Artificial Sequence: Synthetic peptide"
DIWWDDKKDYNPSLKS

SEQ ID NO: 3363 - protein, 10 aa, Artificial Sequence
  source: /note="Description of Artificial Sequence: Synthetic peptide"
SMITNWYFDV

SEQ ID NO: 3364 - protein, 7 aa, Artificial Sequence
  source: /note="Description of Artificial Sequence: Synthetic peptide"
TSGMSVG

SEQ ID NO: 3365 - protein, 16 aa, Artificial Sequence
  source: /note="Description of Artificial Sequence: Synthetic peptide"
DIWWDDKKDYNPSLKS

SEQ ID NO: 3366 - protein, 10 aa, Artificial Sequence
  source: /note="Description of Artificial Sequence: Synthetic peptide"
SMITNWYFDV

SEQ ID NO: 3367 - protein, 142 aa, Artificial Sequence
  source: /note="Description of Artificial Sequence: Synthetic polypeptide"
GFSLAPTSSSTKKTQLQLEHLLLALQMILNGINNYKNPKLTRMLTFKFYMPKKATELKHLQCLEEELKPLEEVLNLAQSKNFHLRPRDLISNINVIVLELKGSETTFMCEYADETATIVEFLNRWITFCQSIISTLTSTSGM

SEQ ID NO: 3368 - protein, 5 aa, Artificial Sequence
  source: /note="Description of Artificial Sequence: Synthetic peptide"
WWDDK

SEQ ID NO: 3369 - protein, 10 aa, Artificial Sequence
  source: /note="Description of Artificial Sequence: Synthetic peptide"
SMITNWYFDV

SEQ ID NO: 3370 - protein, 253 aa, Artificial Sequence
  source: /note="Description of Artificial Sequence: Synthetic polypeptide"
QVTLRESGPALVKPTQTLTLTCTFSGFSLAPTSSSTKKTQLQLEHLLLALQMILNGINNYKNPKLTRMLTFKFYMPKKATELKHLQCLEEELKPLEEVLNLAQSKNFHLRPRDLISNINVIVLELKGSETTFMCEYADETATIVEFLNRWITFCQSIISTLTSTSGMSVGWIRQPPGKALEWLADIWWDDKKDYNPSLKSRLTISKDTSKNQVVLKVTNMDPADTATYYCARSMITNWYFDVWGAGTTVTVSS

SEQ ID NO: 3371 - DNA, 759 bp, Artificial Sequence
  source: /note="Description of Artificial Sequence: Synthetic polynucleotide"
caagtcacactgcgtgaaagcggccctgccctggtcaagcccacccagaccctgaccctgacctgcaccttctccggcttcagcctggcccctacctcctccagcaccaagaaaacccagctgcagctcgaacatctgctgctggccctgcagatgatcctgaacggcatcaacaactacaagaaccccaagctgacccggatgctgaccttcaagttctacatgcccaagaaggccaccgagctgaaacatctgcagtgcctggaagaggaactgaagcccctggaagaagtgctgaacctggcccagtccaagaacttccacctgaggcctcgggacctgatctccaacatcaacgtgatcgtgctggaactgaagggctccgagacaaccttcatgtgcgagtacgccgacgagacagccaccatcgtggaatttctgaaccggtggatcaccttctgccagtccatcatctccaccctgacctccacctccggcatgtccgtgggctggatccggcagcctcctggcaaggccctggagtggctggccgacatttggtgggacgacaagaaggactacaaccccagcctgaagtcccggctgaccatctccaaggacacctccaagaaccaagtggtgctgaaagtgaccaacatggaccccgccgacaccgccacctactactgcgcccggtccatgatcaccaactggtacttcgacgtgtggggcgctggcaccaccgtgaccgtgtcctct

SEQ ID NO: 3372 - protein, 583 aa, Artificial Sequence
  source: /note="Description of Artificial Sequence: Synthetic polypeptide"
QVTLRESGPALVKPTQTLTLTCTFSGFSLAPTSSSTKKTQLQLEHLLLALQMILNGINNYKNPKLTRMLTFKFYMPKKATELKHLQCLEEELKPLEEVLNLAQSKNFHLRPRDLISNINVIVLELKGSETTFMCEYADETATIVEFLNRWITFCQSIISTLTSTSGMSVGWIRQPPGKALEWLADIWWDDKKDYNPSLKSRLTISKDTSKNQVVLKVTNMDPADTATYYCARSMITNWYFDVWGAGTTVTVSSASTKGPSVFPLAPSSKSTSGGTAALGCLVKDYFPEPVTVSWNSGALTSGVHTFPAVLQSSGLYSLSSVVTVPSSSLGTQTYICNVNHKPSNTKVDKRVEPKSCDKTHTCPPCPAPELLGGPSVFLFPPKPKDTLMISRTPEVTCVVVAVSHEDPEVKFNWYVDGVEVHNAKTKPREEQYNSTYRVVSVLTVLHQDWLNGKEYKCKVSNKALAAPIEKTISKAKGQPREPQVYTLPPSREEMTKNQVSLTCLVKGFYPSDIAVEWESNGQPENNYKTTPPVLDSDGSFFLYSKLTVDKSRWQQGNVFSCSVMHEALHNHYTQKSLSLSPGK

SEQ ID NO: 3373 - DNA, 1749 bp, Artificial Sequence
  source: /note="Description of Artificial Sequence: Synthetic polynucleotide"
caagtcacactgcgtgaaagcggccctgccctggtcaagcccacccagaccctgaccctgacctgcaccttctccggcttcagcctggcccctacctcctccagcaccaagaaaacccagctgcagctcgaacatctgctgctggccctgcagatgatcctgaacggcatcaacaactacaagaaccccaagctgacccggatgctgaccttcaagttctacatgcccaagaaggccaccgagctgaaacatctgcagtgcctggaagaggaactgaagcccctggaagaagtgctgaacctggcccagtccaagaacttccacctgaggcctcgggacctgatctccaacatcaacgtgatcgtgctggaactgaagggctccgagacaaccttcatgtgcgagtacgccgacgagacagccaccatcgtggaatttctgaaccggtggatcaccttctgccagtccatcatctccaccctgacctccacctccggcatgtccgtgggctggatccggcagcctcctggcaaggccctggagtggctggccgacatttggtgggacgacaagaaggactacaaccccagcctgaagtcccggctgaccatctccaaggacacctccaagaaccaagtggtgctgaaagtgaccaacatggaccccgccgacaccgccacctactactgcgcccggtccatgatcaccaactggtacttcgacgtgtggggcgctggcaccaccgtgaccgtgtcctctgctagcaccaagggcccctccgtgttccctctggccccttccagcaagtctacctccggcggcacagctgctctgggctgcctggtcaaggactacttccctgagcctgtgacagtgtcctggaactctggcgccctgacctctggcgtgcacaccttccctgccgtgctgcagtcctccggcctgtactccctgtcctccgtggtcacagtgccttcaagcagcctgggcacccagacctatatctgcaacgtgaaccacaagccttccaacaccaaggtggacaagcgggtggagcctaagtcctgcgacaagacccacacctgtcctccctgccctgctcctgaactgctgggcggcccttctgtgttcctgttccctccaaagcccaaggacaccctgatgatctcccggacccctgaagtgacctgcgtggtggtggccgtgtcccacgaggatcctgaagtgaagttcaattggtacgtggacggcgtggaggtgcacaacgccaagaccaagcctcgggaggaacagtacaactccacctaccgggtggtgtccgtgctgaccgtgctgcaccaggactggctgaacggcaaagagtacaagtgcaaagtctccaacaaggccctggccgcccctatcgaaaagacaatctccaaggccaagggccagcctagggaaccccaggtgtacaccctgccacccagccgggaggaaatgaccaagaaccaggtgtccctgacctgtctggtcaagggcttctacccttccgatatcgccgtggagtgggagtctaacggccagcctgagaacaactacaagaccacccctcctgtgctggactccgacggctccttcttcctgtactccaaactgaccgtggacaagtcccggtggcagcagggcaacgtgttctcctgctccgtgatgcacgaggccctgcacaaccactacacccagaagtccctgtccctgtctcccggcaag

SEQ ID NO: 3374 - protein, 10 aa, Artificial Sequence
  source: /note="Description of Artificial Sequence: Synthetic peptide"
KAQLSVGYMH

SEQ ID NO: 3375 - protein, 7 aa, Artificial Sequence
  source: /note="Description of Artificial Sequence: Synthetic peptide"
DTSKLAS

SEQ ID NO: 3376 - protein, 9 aa, Artificial Sequence
  source: /note="Description of Artificial Sequence: Synthetic peptide"
FQGSGYPFT

SEQ ID NO: 3377 - protein, 10 aa, Artificial Sequence
  source: /note="Description of Artificial Sequence: Synthetic peptide"
KAQLSVGYMH

SEQ ID NO: 3378 - protein, 7 aa, Artificial Sequence
  source: /note="Description of Artificial Sequence: Synthetic peptide"
DTSKLAS

SEQ ID NO: 3379 - protein, 9 aa, Artificial Sequence
  source: /note="Description of Artificial Sequence: Synthetic peptide"
FQGSGYPFT

SEQ ID NO: 3380 - protein, 6 aa, Artificial Sequence
  source: /note="Description of Artificial Sequence: Synthetic peptide"
QLSVGY

SEQ ID NO: 3381 - protein, 3 aa, Artificial Sequence
  source: /note="Description of Artificial Sequence: Synthetic peptide"
DTS

SEQ ID NO: 3382 - protein, 6 aa, Artificial Sequence
  source: /note="Description of Artificial Sequence: Synthetic peptide"
GSGYPF

SEQ ID NO: 3383 - protein, 106 aa, Artificial Sequence; identical to SEQ ID NO: 15
  source: /note="Description of Artificial Sequence: Synthetic polypeptide"

SEQ ID NO: 3384 - DNA, 318 bp, Artificial Sequence
  source: /note="Description of Artificial Sequence: Synthetic polynucleotide"
gacatccagatgacccagagcccctccaccctgtccgcctccgtgggcgacagagtgaccatcacttgcaaggcccagctgtccgtgggctacatgcactggtatcagcagaagcccggcaaggcccctaagctgctgatctacgacacctccaagctggcctccggcgtgccctccagattctccggctctggctccggcaccgagttcaccctgaccatctccagcctgcagcccgacgacttcgccacctactactgttttcaaggctccggctaccccttcaccttcggcggaggcaccaagctggaaatcaag

SEQ ID NO: 3385 - protein, 213 aa, Artificial Sequence; identical to SEQ ID NO: 16
  source: /note="Description of Artificial Sequence: Synthetic polypeptide"

SEQ ID NO: 3386 - DNA, 639 bp, Artificial Sequence
  source: /note="Description of Artificial Sequence: Synthetic polynucleotide"
gacatccagatgacccagagcccctccaccctgtccgcctccgtgggcgacagagtgaccatcacttgcaaggcccagctgtccgtgggctacatgcactggtatcagcagaagcccggcaaggcccctaagctgctgatctacgacacctccaagctggcctccggcgtgccctccagattctccggctctggctccggcaccgagttcaccctgaccatctccagcctgcagcccgacgacttcgccacctactactgttttcaaggctccggctaccccttcaccttcggcggaggcaccaagctggaaatcaagcgtacggtggccgctcccagcgtgttcatcttcccccccagcgacgagcagctgaagagcggcaccgccagcgtggtgtgcctgctgaacaacttctacccccgggaggccaaggtgcagtggaaggtggacaacgccctgcagagcggcaacagccaggagagcgtcaccgagcaggacagcaaggactccacctacagcctgagcagcaccctgaccctgagcaaggccgactacgagaagcataaggtgtacgcctgcgaggtgacccaccagggcctgtccagccccgtgaccaagagcttcaacaggggcgagtgc

SEQ ID NO: 3387 - protein, 145 aa, Artificial Sequence
  source: /note="Description of Artificial Sequence: Synthetic polypeptide"
GFSLAPTSSSTKKTQLQLEHLLLALQMILNGINNYKNPKLTRMLTFKFYMPKKATELKHLQCLEEELKPLEEVLNLAQSKNFHLRPRDLISNINVIVLELKGSETTFMCEYADETATIVEFLNRWITFSQSIISTLTSTSGMSVG

SEQ ID NO: 3388 - protein, 16 aa, Artificial Sequence
  source: /note="Description of Artificial Sequence: Synthetic peptide"
DIWWDDKKDYNPSLKS

SEQ ID NO: 3389 - protein, 10 aa, Artificial Sequence
  source: /note="Description of Artificial Sequence: Synthetic peptide"
SMITNWYFDV

SEQ ID NO: 3390 - protein, 7 aa, Artificial Sequence
  source: /note="Description of Artificial Sequence: Synthetic peptide"
TSGMSVG

SEQ ID NO: 3391 - protein, 16 aa, Artificial Sequence
  source: /note="Description of Artificial Sequence: Synthetic peptide"
DIWWDDKKDYNPSLKS

SEQ ID NO: 3392 - protein, 10 aa, Artificial Sequence
  source: /note="Description of Artificial Sequence: Synthetic peptide"
SMITNWYFDV

SEQ ID NO: 3393 - protein, 142 aa, Artificial Sequence
  source: /note="Description of Artificial Sequence: Synthetic polypeptide"
GFSLAPTSSSTKKTQLQLEHLLLALQMILNGINNYKNPKLTRMLTFKFYMPKKATELKHLQCLEEELKPLEEVLNLAQSKNFHLRPRDLISNINVIVLELKGSETTFMCEYADETATIVEFLNRWITFSQSIISTLTSTSGM

SEQ ID NO: 3394 - protein, 5 aa, Artificial Sequence
  source: /note="Description of Artificial Sequence: Synthetic peptide"
WWDDK

SEQ ID NO: 3395 - protein, 10 aa, Artificial Sequence
  source: /note="Description of Artificial Sequence: Synthetic peptide"
SMITNWYFDV

SEQ ID NO: 3396 - protein, 253 aa, Artificial Sequence
  source: /note="Description of Artificial Sequence: Synthetic polypeptide"
QVTLRESGPALVKPTQTLTLTCTFSGFSLAPTSSSTKKTQLQLEHLLLALQMILNGINNYKNPKLTRMLTFKFYMPKKATELKHLQCLEEELKPLEEVLNLAQSKNFHLRPRDLISNINVIVLELKGSETTFMCEYADETATIVEFLNRWITFSQSIISTLTSTSGMSVGWIRQPPGKALEWLADIWWDDKKDYNPSLKSRLTISKDTSKNQVVLKVTNMDPADTATYYCARSMITNWYFDVWGAGTTVTVSS

SEQ ID NO: 3397 - DNA, 759 bp, Artificial Sequence
  source: /note="Description of Artificial Sequence: Synthetic polynucleotide"
caagtcacactgcgtgaaagcggccctgccctggtcaagcccacccagaccctgaccctgacctgcaccttctccggcttcagcctggcccctacctcctccagcaccaagaaaacccagctgcagctcgaacatctgctgctggccctgcagatgatcctgaacggcatcaacaactacaagaaccccaagctgacccggatgctgaccttcaagttctacatgcccaagaaggccaccgagctgaaacatctgcagtgcctggaagaggaactgaagcccctggaagaagtgctgaacctggcccagtccaagaacttccacctgaggcctcgggacctgatctccaacatcaacgtgatcgtgctggaactgaagggctccgagacaaccttcatgtgcgagtacgccgacgagacagccaccatcgtggaatttctgaaccggtggatcaccttctcccagtccatcatctccaccctgacctccacctccggcatgtccgtgggctggatccggcagcctcctggcaaggccctggagtggctggccgacatttggtgggacgacaagaaggactacaaccccagcctgaagtcccggctgaccatctccaaggacacctccaagaaccaagtggtgctgaaagtgaccaacatggaccccgccgacaccgccacctactactgcgcccggtccatgatcaccaactggtacttcgacgtgtggggcgctggcaccaccgtgaccgtgtcctct

SEQ ID NO: 3398 - protein, 583 aa, Artificial Sequence
  source: /note="Description of Artificial Sequence: Synthetic polypeptide"
QVTLRESGPALVKPTQTLTLTCTFSGFSLAPTSSSTKKTQLQLEHLLLALQMILNGINNYKNPKLTRMLTFKFYMPKKATELKHLQCLEEELKPLEEVLNLAQSKNFHLRPRDLISNINVIVLELKGSETTFMCEYADETATIVEFLNRWITFSQSIISTLTSTSGMSVGWIRQPPGKALEWLADIWWDDKKDYNPSLKSRLTISKDTSKNQVVLKVTNMDPADTATYYCARSMITNWYFDVWGAGTTVTVSSASTKGPSVFPLAPSSKSTSGGTAALGCLVKDYFPEPVTVSWNSGALTSGVHTFPAVLQSSGLYSLSSVVTVPSSSLGTQTYICNVNHKPSNTKVDKRVEPKSCDKTHTCPPCPAPELLGGPSVFLFPPKPKDTLMISRTPEVTCVVVAVSHEDPEVKFNWYVDGVEVHNAKTKPREEQYNSTYRVVSVLTVLHQDWLNGKEYKCKVSNKALAAPIEKTISKAKGQPREPQVYTLPPSREEMTKNQVSLTCLVKGFYPSDIAVEWESNGQPENNYKTTPPVLDSDGSFFLYSKLTVDKSRWQQGNVFSCSVMHEALHNHYTQKSLSLSPGK

SEQ ID NO: 3399 - DNA, 1749 bp, Artificial Sequence
  source: /note="Description of Artificial Sequence: Synthetic polynucleotide"
caagtcacactgcgtgaaagcggccctgccctggtcaagcccacccagaccctgaccctgacctgcaccttctccggcttcagcctggcccctacctcctccagcaccaagaaaacccagctgcagctcgaacatctgctgctggccctgcagatgatcctgaacggcatcaacaactacaagaaccccaagctgacccggatgctgaccttcaagttctacatgcccaagaaggccaccgagctgaaacatctgcagtgcctggaagaggaactgaagcccctggaagaagtgctgaacctggcccagtccaagaacttccacctgaggcctcgggacctgatctccaacatcaacgtgatcgtgctggaactgaagggctccgagacaaccttcatgtgcgagtacgccgacgagacagccaccatcgtggaatttctgaaccggtggatcaccttctcccagtccatcatctccaccctgacctccacctccggcatgtccgtgggctggatccggcagcctcctggcaaggccctggagtggctggccgacatttggtgggacgacaagaaggactacaaccccagcctgaagtcccggctgaccatctccaaggacacctccaagaaccaagtggtgctgaaagtgaccaacatggaccccgccgacaccgccacctactactgcgcccggtccatgatcaccaactggtacttcgacgtgtggggcgctggcaccaccgtgaccgtgtcctctgctagcaccaagggcccctccgtgttccctctggccccttccagcaagtctacctccggcggcacagctgctctgggctgcctggtcaaggactacttccctgagcctgtgacagtgtcctggaactctggcgccctgacctctggcgtgcacaccttccctgccgtgctgcagtcctccggcctgtactccctgtcctccgtggtcacagtgccttcaagcagcctgggcacccagacctatatctgcaacgtgaaccacaagccttccaacaccaaggtggacaagcgggtggagcctaagtcctgcgacaagacccacacctgtcctccctgccctgctcctgaactgctgggcggcccttctgtgttcctgttccctccaaagcccaaggacaccctgatgatctcccggacccctgaagtgacctgcgtggtggtggccgtgtcccacgaggatcctgaagtgaagttcaattggtacgtggacggcgtggaggtgcacaacgccaagaccaagcctcgggaggaacagtacaactccacctaccgggtggtgtccgtgctgaccgtgctgcaccaggactggctgaacggcaaagagtacaagtgcaaagtctccaacaaggccctggccgcccctatcgaaaagacaatctccaaggccaagggccagcctagggaaccccaggtgtacaccctgccacccagccgggaggaaatgaccaagaaccaggtgtccctgacctgtctggtcaagggcttctacccttccgatatcgccgtggagtgggagtctaacggccagcctgagaacaactacaagaccacccctcctgtgctggactccgacggctccttcttcctgtactccaaactgaccgtggacaagtcccggtggcagcagggcaacgtgttctcctgctccgtgatgcacgaggccctgcacaaccactacacccagaagtccctgtccctgtctcccggcaag

SEQ ID NO: 3400 - protein, 10 aa, Artificial Sequence
  source: /note="Description of Artificial Sequence: Synthetic peptide"
KAQLSVGYMH

SEQ ID NO: 3401 - protein, 7 aa, Artificial Sequence
  source: /note="Description of Artificial Sequence: Synthetic peptide"
DTSKLAS

SEQ ID NO: 3402 - protein, 9 aa, Artificial Sequence
  source: /note="Description of Artificial Sequence: Synthetic peptide"
FQGSGYPFT

SEQ ID NO: 3403 - protein, 10 aa, Artificial Sequence
  source: /note="Description of Artificial Sequence: Synthetic peptide"
KAQLSVGYMH

SEQ ID NO: 3404 - protein, 7 aa, Artificial Sequence
  source: /note="Description of Artificial Sequence: Synthetic peptide"
DTSKLAS

SEQ ID NO: 3405 - protein, 9 aa, Artificial Sequence
  source: /note="Description of Artificial Sequence: Synthetic peptide"
FQGSGYPFT

SEQ ID NO: 3406 - protein, 6 aa, Artificial Sequence
  source: /note="Description of Artificial Sequence: Synthetic peptide"
QLSVGY

SEQ ID NO: 3407 - protein, 3 aa, Artificial Sequence
  source: /note="Description of Artificial Sequence: Synthetic peptide"
DTS

SEQ ID NO: 3408 - protein, 6 aa, Artificial Sequence
  source: /note="Description of Artificial Sequence: Synthetic peptide"
GSGYPF

SEQ ID NO: 3409 - protein, 106 aa, Artificial Sequence; identical to SEQ ID NO: 15
  source: /note="Description of Artificial Sequence: Synthetic polypeptide"

SEQ ID NO: 3410 - DNA, 318 bp, Artificial Sequence; identical to SEQ ID NO: 3384
  source: /note="Description of Artificial Sequence: Synthetic polynucleotide"

SEQ ID NO: 3411 - protein, 213 aa, Artificial Sequence; identical to SEQ ID NO: 16
  source: /note="Description of Artificial Sequence: Synthetic polypeptide"

SEQ ID NO: 3412 - DNA, 639 bp, Artificial Sequence; identical to SEQ ID NO: 3386
  source: /note="Description of Artificial Sequence: Synthetic polynucleotide"

SEQ ID NO: 3413 - protein, 12 aa, Artificial Sequence
  source: /note="Description of Artificial Sequence: Synthetic peptide"
GFSLSTSGMSVG

SEQ ID NO: 3414 - protein, 16 aa, Artificial Sequence
  source: /note="Description of Artificial Sequence: Synthetic peptide"
DIWWDDKKDYNPSLKS

SEQ ID NO: 3415 - protein, 10 aa, Artificial Sequence
  source: /note="Description of Artificial Sequence: Synthetic peptide"
SMITNWYFDV

SEQ ID NO: 3416 - protein, 7 aa, Artificial Sequence
  source: /note="Description of Artificial Sequence: Synthetic peptide"
TSGMSVG

SEQ ID NO: 3417 - protein, 16 aa, Artificial Sequence
  source: /note="Description of Artificial Sequence: Synthetic peptide"
DIWWDDKKDYNPSLKS

SEQ ID NO: 3418 - protein, 10 aa, Artificial Sequence
  source: /note="Description of Artificial Sequence: Synthetic peptide"
SMITNWYFDV

SEQ ID NO: 3419 - protein, 9 aa, Artificial Sequence
  source: /note="Description of Artificial Sequence: Synthetic peptide"
GFSLSTSGM

SEQ ID NO: 3420 - protein, 5 aa, Artificial Sequence
  source: /note="Description of Artificial Sequence: Synthetic peptide"
WWDDK

SEQ ID NO: 3421 - protein, 10 aa, Artificial Sequence
  source: /note="Description of Artificial Sequence: Synthetic peptide"
SMITNWYFDV

SEQ ID NO: 3422 - protein, 120 aa, Artificial Sequence
  source: /note="Description of Artificial Sequence: Synthetic polypeptide"
QVTLRESGPALVKPTQTLTLTCTFSGFSLSTSGMSVGWIRQPPGKALEWLADIWWDDKKDYNPSLKSRLTISKDTSKNQVVLKVTNMDPADTATYYCARSMITNWYFDVWGAGTTVTVSS

SEQ ID NO: 3423 - DNA, 360 bp, Artificial Sequence
  source: /note="Description of Artificial Sequence: Synthetic polynucleotide"
caagtcaccctgcgtgaaagcggccctgccctggtcaagcccacccagaccctgaccctgacctgcaccttctccggcttctccctgtccacctccggcatgtccgtgggctggatccggcagcctcctggcaaggccctggagtggctggccgacatttggtgggacgacaagaaggactacaaccccagcctgaagtcccggctgaccatctccaaggacacctccaagaaccaagtggtgctgaaagtgaccaacatggaccccgccgacaccgccacctactactgcgcccggtccatgatcaccaactggtacttcgacgtgtggggcgctggcaccaccgtgaccgtgtcctct

SEQ ID NO: 3424 - protein, 450 aa, Artificial Sequence
  source: /note="Description of Artificial Sequence: Synthetic polypeptide"
QVTLRESGPALVKPTQTLTLTCTFSGFSLSTSGMSVGWIRQPPGKALEWLADIWWDDKKDYNPSLKSRLTISKDTSKNQVVLKVTNMDPADTATYYCARSMITNWYFDVWGAGTTVTVSSASTKGPSVFPLAPSSKSTSGGTAALGCLVKDYFPEPVTVSWNSGALTSGVHTFPAVLQSSGLYSLSSVVTVPSSSLGTQTYICNVNHKPSNTKVDKRVEPKSCDKTHTCPPCPAPELLGGPSVFLFPPKPKDTLMISRTPEVTCVVVAVSHEDPEVKFNWYVDGVEVHNAKTKPREEQYNSTYRVVSVLTVLHQDWLNGKEYKCKVSNKALAAPIEKTISKAKGQPREPQVYTLPPSREEMTKNQVSLTCLVKGFYPSDIAVEWESNGQPENNYKTTPPVLDSDGSFFLYSKLTVDKSRWQQGNVFSCSVMHEALHNHYTQKSLSLSPGK

SEQ ID NO: 3425 - DNA, 1350 bp, Artificial Sequence
  source: /note="Description of Artificial Sequence: Synthetic polynucleotide"
caagtcaccctgcgtgaaagcggccctgccctggtcaagcccacccagaccctgaccctgacctgcaccttctccggcttctccctgtccacctccggcatgtccgtgggctggatccggcagcctcctggcaaggccctggagtggctggccgacatttggtgggacgacaagaaggactacaaccccagcctgaagtcccggctgaccatctccaaggacacctccaagaaccaagtggtgctgaaagtgaccaacatggaccccgccgacaccgccacctactactgcgcccggtccatgatcaccaactggtacttcgacgtgtggggcgctggcaccaccgtgaccgtgtcctctgctagcaccaagggcccctccgtgttccctctggccccttccagcaagtctacctccggcggcacagctgctctgggctgcctggtcaaggactacttccctgagcctgtgacagtgtcctggaactctggcgccctgacctctggcgtgcacaccttccctgccgtgctgcagtcctccggcctgtactccctgtcctccgtggtcacagtgccttcaagcagcctgggcacccagacctatatctgcaacgtgaaccacaagccttccaacaccaaggtggacaagcgggtggagcctaagtcctgcgacaagacccacacctgtcctccctgccctgctcctgaactgctgggcggcccttctgtgttcctgttccctccaaagcccaaggacaccctgatgatctcccggacccctgaagtgacctgcgtggtggtggccgtgtcccacgaggatcctgaagtgaagttcaattggtacgtggacggcgtggaggtgcacaacgccaagaccaagcctcgggaggaacagtacaactccacctaccgggtggtgtccgtgctgaccgtgctgcaccaggactggctgaacggcaaagagtacaagtgcaaagtctccaacaaggccctggccgcccctatcgaaaagacaatctccaaggccaagggccagcctagggaaccccaggtgtacaccctgccacccagccgggaggaaatgaccaagaaccaggtgtccctgacctgtctggtcaagggcttctacccttccgatatcgccgtggagtgggagtctaacggccagcctgagaacaactacaagaccacccctcctgtgctggactccgacggctccttcttcctgtactccaaactgaccgtggacaagtcccggtggcagcagggcaacgtgttctcctgctccgtgatgcacgaggccctgcacaaccactacacccagaagtccctgtccctgtctcccggcaag

SEQ ID NO: 3426 - protein, 10 aa, Artificial Sequence
  source: /note="Description of Artificial Sequence: Synthetic peptide"
KAQLSVGYMH

SEQ ID NO: 3427 - protein, 7 aa, Artificial Sequence
  source: /note="Description of Artificial Sequence: Synthetic peptide"
DTSKLAS

SEQ ID NO: 3428 - protein, 142 aa, Artificial Sequence
  source: /note="Description of Artificial Sequence: Synthetic polypeptide"
FQGSGAPTSSSTKKTQLQLEHLLLDLQMILNGINNYKNPKLTRMLTFKFYMPKKATELKHLQCLEEELKPLEEVLNLAQSKNFHLRPRDLISNINVIVLELKGSETTFMCEYADETATIVEFLNRWITFCQSIISTLTYPFT

SEQ ID NO: 3429 - protein, 10 aa, Artificial Sequence
  source: /note="Description of Artificial Sequence: Synthetic peptide"
KAQLSVGYMH

SEQ ID NO: 3430 - protein, 7 aa, Artificial Sequence
  source: /note="Description of Artificial Sequence: Synthetic peptide"
DTSKLAS

SEQ ID NO: 3431 - protein, 142 aa, Artificial Sequence; identical to SEQ ID NO: 3428
  source: /note="Description of Artificial Sequence: Synthetic polypeptide"

SEQ ID NO: 3432 - protein, 6 aa, Artificial Sequence
  source: /note="Description of Artificial Sequence: Synthetic peptide"
QLSVGY

SEQ ID NO: 3433 - protein, 3 aa, Artificial Sequence
  source: /note="Description of Artificial Sequence: Synthetic peptide"
DTS

SEQ ID NO: 3434 - protein, 139 aa, Artificial Sequence
  source: /note="Description of Artificial Sequence: Synthetic polypeptide"
GSGAPTSSSTKKTQLQLEHLLLDLQMILNGINNYKNPKLTRMLTFKFYMPKKATELKHLQCLEEELKPLEEVLNLAQSKNFHLRPRDLISNINVIVLELKGSETTFMCEYADETATIVEFLNRWITFCQSIISTLTYPF

SEQ ID NO: 3435 - protein, 239 aa, Artificial Sequence
  source: /note="Description of Artificial Sequence: Synthetic polypeptide"
DIQMTQSPSTLSASVGDRVTITCKAQLSVGYMHWYQQKPGKAPKLLIYDTSKLASGVPSRFSGSGSGTEFTLTISSLQPDDFATYYCFQGSGAPTSSSTKKTQLQLEHLLLDLQMILNGINNYKNPKLTRMLTFKFYMPKKATELKHLQCLEEELKPLEEVLNLAQSKNFHLRPRDLISNINVIVLELKGSETTFMCEYADETATIVEFLNRWITFCQSIISTLTYPFTFGGGTKLEIK

SEQ ID NO: 3436 - DNA, 717 bp, Artificial Sequence
  source: /note="Description of Artificial Sequence: Synthetic polynucleotide"
gacatccagatgacccagagcccctccaccctgtccgcctccgtgggcgacagagtgaccatcacttgcaaggcccagctgtccgtgggctacatgcactggtatcagcagaagcccggcaaggcccctaagctgctgatctacgacacctccaagctggcctccggcgtgccctccagattctccggctctggctccggcaccgagttcaccctgaccatctccagcctgcagcccgacgacttcgccacctactactgttttcaaggctctggcgcccctacctcctccagcaccaagaaaacccagctgcagctcgaacatctgctgctggacctgcagatgatcctgaacggcatcaacaactacaagaaccccaagctgacccggatgctgaccttcaagttctacatgcccaagaaggccaccgagctgaaacatctgcagtgcctggaagaggaactgaagcccctggaagaagtgctgaacctggcccagtccaagaacttccacctgaggcctcgggacctgatctccaacatcaacgtgatcgtgctggaactgaagggctccgagacaaccttcatgtgcgagtacgccgacgagacagccaccatcgtggaatttctgaaccggtggatcaccttctgccagtccatcatctccaccctgacctaccccttcaccttcggcggaggcaccaagctggaaatcaag

SEQ ID NO: 3437 - protein, 346 aa, Artificial Sequence
  source: /note="Description of Artificial Sequence: Synthetic polypeptide"
DIQMTQSPSTLSASVGDRVTITCKAQLSVGYMHWYQQKPGKAPKLLIYDTSKLASGVPSRFSGSGSGTEFTLTISSLQPDDFATYYCFQGSGAPTSSSTKKTQLQLEHLLLDLQMILNGINNYKNPKLTRMLTFKFYMPKKATELKHLQCLEEELKPLEEVLNLAQSKNFHLRPRDLISNINVIVLELKGSETTFMCEYADETATIVEFLNRWITFCQSIISTLTYPFTFGGGTKLEIKRTVAAPSVFIFPPSDEQLKSGTASVVCLLNNFYPREAKVQWKVDNALQSGNSQESVTEQDSKDSTYSLSSTLTLSKADYEKHKVYACEVTHQGLSSPVTKSFNRGEC

SEQ ID NO: 3438 - DNA, 1038 bp, Artificial Sequence
  source: /note="Description of Artificial Sequence: Synthetic polynucleotide"
gacatccagatgacccagagcccctccaccctgtccgcctccgtgggcgacagagtgaccatcacttgcaaggcccagctgtccgtgggctacatgcactggtatcagcagaagcccggcaaggcccctaagctgctgatctacgacacctccaagctggcctccggcgtgccctccagattctccggctctggctccggcaccgagttcaccctgaccatctccagcctgcagcccgacgacttcgccacctactactgttttcaaggctctggcgcccctacctcctccagcaccaagaaaacccagctgcagctcgaacatctgctgctggacctgcagatgatcctgaacggcatcaacaactacaagaaccccaagctgacccggatgctgaccttcaagttctacatgcccaagaaggccaccgagctgaaacatctgcagtgcctggaagaggaactgaagcccctggaagaagtgctgaacctggcccagtccaagaacttccacctgaggcctcgggacctgatctccaacatcaacgtgatcgtgctggaactgaagggctccgagacaaccttcatgtgcgagtacgccgacgagacagccaccatcgtggaatttctgaaccggtggatcaccttctgccagtccatcatctccaccctgacctaccccttcaccttcggcggaggcaccaagctggaaatcaagcgtacggtggccgctcccagcgtgttcatcttcccccccagcgacgagcagctgaagagcggcaccgccagcgtggtgtgcctgctgaacaacttctacccccgggaggccaaggtgcagtggaaggtggacaacgccctgcagagcggcaacagccaggagagcgtcaccgagcaggacagcaaggactccacctacagcctgagcagcaccctgaccctgagcaaggccgactacgagaagcataaggtgtacgcctgcgaggtgacccaccagggcctgtccagccccgtgaccaagagcttcaacaggggcgagtgc

SEQ ID NO: 3439 - protein, 12 aa, Artificial Sequence
  source: /note="Description of Artificial Sequence: Synthetic peptide"
GFSLSTSGMSVG

SEQ ID NO: 3440 - protein, 16 aa, Artificial Sequence
  source: /note="Description of Artificial Sequence: Synthetic peptide"
DIWWDDKKDYNPSLKS

SEQ ID NO: 3441 - protein, 10 aa, Artificial Sequence
  source: /note="Description of Artificial Sequence: Synthetic peptide"
SMITNWYFDV

SEQ ID NO: 3442 - protein, 7 aa, Artificial Sequence
  source: /note="Description of Artificial Sequence: Synthetic peptide"
TSGMSVG

SEQ ID NO: 3443 - protein, 16 aa, Artificial Sequence
  source: /note="Description of Artificial Sequence: Synthetic peptide"
DIWWDDKKDYNPSLKS

SEQ ID NO: 3444 - protein, 10 aa, Artificial Sequence
  source: /note="Description of Artificial Sequence: Synthetic peptide"
SMITNWYFDV

SEQ ID NO: 3445 - protein, 9 aa, Artificial Sequence
  source: /note="Description of Artificial Sequence: Synthetic peptide"
GFSLSTSGM

SEQ ID NO: 3446 - protein, 5 aa, Artificial Sequence
  source: /note="Description of Artificial Sequence: Synthetic peptide"
WWDDK

SEQ ID NO: 3447 - protein, 10 aa, Artificial Sequence
  source: /note="Description of Artificial Sequence: Synthetic peptide"
SMITNWYFDV

SEQ ID NO: 3448 - protein, 120 aa, Artificial Sequence; identical to SEQ ID NO: 3422
  source: /note="Description of Artificial Sequence: Synthetic polypeptide"

SEQ ID NO: 3449 - DNA, 360 bp, Artificial Sequence; identical to SEQ ID NO: 3423
  source: /note="Description of Artificial Sequence: Synthetic polynucleotide"

SEQ ID NO: 3450 - protein, 450 aa, Artificial Sequence; identical to SEQ ID NO: 3424
  source: /note="Description of Artificial Sequence: Synthetic polypeptide"

SEQ ID NO: 3451 - DNA, 1350 bp, Artificial Sequence; identical to SEQ ID NO: 3425
  source: /note="Description of Artificial Sequence: Synthetic polynucleotide"

SEQ ID NO: 3452 - protein, 10 aa, Artificial Sequence
  source: /note="Description of Artificial Sequence: Synthetic peptide"
KAQLSVGYMH

SEQ ID NO: 3453 - protein, 7 aa, Artificial Sequence
  source: /note="Description of Artificial Sequence: Synthetic peptide"
DTSKLAS

SEQ ID NO: 3454 - protein, 142 aa, Artificial Sequence
  source: /note="Description of Artificial Sequence: Synthetic polypeptide"
FQGSGAPTSSSTKKTQLQLEHLLLDLQMILNGINNYKNPKLTRMLTFKFYMPKKATELKHLQCLEEELKPLEEVLNLAQSKNFHLRPRDLISNINVIVLELKGSETTFMCEYADETATIVEFLNRWITFSQSIISTLTYPFT

SEQ ID NO: 3455 - protein, 10 aa, Artificial Sequence
  source: /note="Description of Artificial Sequence: Synthetic peptide"
KAQLSVGYMH

SEQ ID NO: 3456 - protein, 7 aa, Artificial Sequence
  source: /note="Description of Artificial Sequence: Synthetic peptide"
DTSKLAS

SEQ ID NO: 3457 - protein, 142 aa, Artificial Sequence; identical to SEQ ID NO: 3454
  source: /note="Description of Artificial Sequence: Synthetic polypeptide"

SEQ ID NO: 3458 - protein, 6 aa, Artificial Sequence
  source: /note="Description of Artificial Sequence: Synthetic peptide"
QLSVGY

SEQ ID NO: 3459 - protein, 3 aa, Artificial Sequence
  source: /note="Description of Artificial Sequence: Synthetic peptide"
DTS

SEQ ID NO: 3460 - protein, 139 aa, Artificial Sequence
  source: /note="Description of Artificial Sequence: Synthetic polypeptide"
GSGAPTSSSTKKTQLQLEHLLLDLQMILNGINNYKNPKLTRMLTFKFYMPKKATELKHLQCLEEELKPLEEVLNLAQSKNFHLRPRDLISNINVIVLELKGSETTFMCEYADETATIVEFLNRWITFSQSIISTLTYPF

SEQ ID NO: 3461 - protein, 239 aa, Artificial Sequence
  source: /note="Description of Artificial Sequence: Synthetic polypeptide"
DIQMTQSPSTLSASVGDRVTITCKAQLSVGYMHWYQQKPGKAPKLLIYDTSKLASGVPSRFSGSGSGTEFTLTISSLQPDDFATYYCFQGSGAPTSSSTKKTQLQLEHLLLDLQMILNGINNYKNPKLTRMLTFKFYMPKKATELKHLQCLEEELKPLEEVLNLAQSKNFHLRPRDLISNINVIVLELKGSETTFMCEYADETATIVEFLNRWITFSQSIISTLTYPFTFGGGTKLEIK

SEQ ID NO: 3462 - DNA, 717 bp, Artificial Sequence
  source: /note="Description of Artificial Sequence: Synthetic polynucleotide"
gacatccagatgacccagagcccctccaccctgtccgcctccgtgggcgacagagtgaccatcacttgcaaggcccagctgtccgtgggctacatgcactggtatcagcagaagcccggcaaggcccctaagctgctgatctacgacacctccaagctggcctccggcgtgccctccagattctccggctctggctccggcaccgagttcaccctgaccatctccagcctgcagcccgacgacttcgccacctactactgttttcaaggctctggcgcccctacctcctccagcaccaagaaaacccagctgcagctcgaacatctgctgctggacctgcagatgatcctgaacggcatcaacaactacaagaaccccaagctgacccggatgctgaccttcaagttctacatgcccaagaaggccaccgagctgaaacatctgcagtgcctggaagaggaactgaagcccctggaagaagtgctgaacctggcccagtccaagaacttccacctgaggcctcgggacctgatctccaacatcaacgtgatcgtgctggaactgaagggctccgagacaaccttcatgtgcgagtacgccgacgagacagccaccatcgtggaatttctgaaccggtggatcaccttctcccagtccatcatctccaccctgacctaccccttcaccttcggcggaggcaccaagctggaaatcaag

SEQ ID NO: 3463 - protein, 346 aa, Artificial Sequence
  source: /note="Description of Artificial Sequence: Synthetic polypeptide"
DIQMTQSPSTLSASVGDRVTITCKAQLSVGYMHWYQQKPGKAPKLLIYDTSKLASGVPSRFSGSGSGTEFTLTISSLQPDDFATYYCFQGSGAPTSSSTKKTQLQLEHLLLDLQMILNGINNYKNPKLTRMLTFKFYMPKKATELKHLQCLEEELKPLEEVLNLAQSKNFHLRPRDLISNINVIVLELKGSETTFMCEYADETATIVEFLNRWITFSQSIISTLTYPFTFGGGTKLEIKRTVAAPSVFIFPPSDEQLKSGTASVVCLLNNFYPREAKVQWKVDNALQSGNSQESVTEQDSKDSTYSLSSTLTLSKADYEKHKVYACEVTHQGLSSPVTKSFNRGEC

SEQ ID NO: 3464 - DNA, 1038 bp, Artificial Sequence
  source: /note="Description of Artificial Sequence: Synthetic polynucleotide"
gacatccagatgacccagagcccctccaccctgtccgcctccgtgggcgacagagtgaccatcacttgcaaggcccagctgtccgtgggctacatgcactggtatcagcagaagcccggcaaggcccctaagctgctgatctacgacacctccaagctggcctccggcgtgccctccagattctccggctctggctccggcaccgagttcaccctgaccatctccagcctgcagcccgacgacttcgccacctactactgttttcaaggctctggcgcccctacctcctccagcaccaagaaaacccagctgcagctcgaacatctgctgctggacctgcagatgatcctgaacggcatcaacaactacaagaaccccaagctgacccggatgctgaccttcaagttctacatgcccaagaaggccaccgagctgaaacatctgcagtgcctggaagaggaactgaagcccctggaagaagtgctgaacctggcccagtccaagaacttccacctgaggcctcgggacctgatctccaacatcaacgtgatcgtgctggaactgaagggctccgagacaaccttcatgtgcgagtacgccgacgagacagccaccatcgtggaatttctgaaccggtggatcaccttctcccagtccatcatctccaccctgacctaccccttcaccttcggcggaggcaccaagctggaaatcaagcgtacggtggccgctcccagcgtgttcatcttcccccccagcgacgagcagctgaagagcggcaccgccagcgtggtgtgcctgctgaacaacttctacccccgggaggccaaggtgcagtggaaggtggacaacgccctgcagagcggcaacagccaggagagcgtcaccgagcaggacagcaaggactccacctacagcctgagcagcaccctgaccctgagcaaggccgactacgagaagcataaggtgtacgcctgcgaggtgacccaccagggcctgtccagccccgtgaccaagagcttcaacaggggcgagtgc

SEQ ID NO: 3465 - protein, 145 aa, Artificial Sequence
  source: /note="Description of Artificial Sequence: Synthetic polypeptide"
GFSLAPTSSSTKKTQLQLEHLLLDLQMILNGINNYKNPKLTAMLTFKFYMPKKATELKHLQCLEEELKPLEEVLNLAQSKNFHLRPRDLISNINVIVLELKGSETTFMCEYADETATIVEFLNRWITFCQSIISTLTSTSGMSVG

SEQ ID NO: 3466 - protein, 16 aa, Artificial Sequence
  source: /note="Description of Artificial Sequence: Synthetic peptide"
DIWWDDKKDYNPSLKS

SEQ ID NO: 3467 - protein, 10 aa, Artificial Sequence
  source: /note="Description of Artificial Sequence: Synthetic peptide"
SMITNWYFDV

SEQ ID NO: 3468 - protein, 141 aa, Artificial Sequence
  source: /note="Description of Artificial Sequence: Synthetic polypeptide"
APTSSSTKKTQLQLEHLLLDLQMILNGINNYKNPKLTAMLTFKFYMPKKATELKHLQCLEEELKPLEEVLNLAQSKNFHLRPRDLISNINVIVLELKGSETTFMCEYADETATIVEFLNRWITFCQSIISTLTSTSGMSVG

SEQ ID NO: 3469 - protein, 16 aa, Artificial Sequence
  source: /note="Description of Artificial Sequence: Synthetic peptide"
DIWWDDKKDYNPSLKS

SEQ ID NO: 3470 - protein, 10 aa, Artificial Sequence
  source: /note="Description of Artificial Sequence: Synthetic peptide"
SMITNWYFDV

SEQ ID NO: 3471 - protein, 142 aa, Artificial Sequence
  source: /note="Description of Artificial Sequence: Synthetic polypeptide"
GFSLAPTSSSTKKTQLQLEHLLLDLQMILNGINNYKNPKLTAMLTFKFYMPKKATELKHLQCLEEELKPLEEVLNLAQSKNFHLRPRDLISNINVIVLELKGSETTFMCEYADETATIVEFLNRWITFCQSIISTLTSTSGM

SEQ ID NO: 3472 - protein, 5 aa, Artificial Sequence
  source: /note="Description of Artificial Sequence: Synthetic peptide"
WWDDK

SEQ ID NO: 3473 - protein, 10 aa, Artificial Sequence
  source: /note="Description of Artificial Sequence: Synthetic peptide"
SMITNWYFDV

SEQ ID NO: 3474 - protein, 143 aa, Artificial Sequence
  source: /note="Description of Artificial Sequence: Synthetic polypeptide"
GFSLAPTSSSTKKTQLQLEHLLLDLQMILNGINNYKNPKLTAMLTFKFYMPKKATELKHLQCLEEELKPLEEVLNLAQSKNFHLRPRDLISNINVIVLELKGSETTFMCEYADETATIVEFLNRWITFCQSIISTLTSTSGMS

SEQ ID NO: 3475 - protein, 7 aa, Artificial Sequence
  source: /note="Description of Artificial Sequence: Synthetic peptide"
IWWDDKK

SEQ ID NO: 3476 - protein, 12 aa, Artificial Sequence
  source: /note="Description of Artificial Sequence: Synthetic peptide"
ARSMITNWYFDV

SEQ ID NO: 3477 - protein, 253 aa, Artificial Sequence
  source: /note="Description of Artificial Sequence: Synthetic polypeptide"
QVTLRESGPALVKPTQTLTLTCTFSGFSLAPTSSSTKKTQLQLEHLLLDLQMILNGINNYKNPKLTAMLTFKFYMPKKATELKHLQCLEEELKPLEEVLNLAQSKNFHLRPRDLISNINVIVLELKGSETTFMCEYADETATIVEFLNRWITFCQSIISTLTSTSGMSVGWIRQPPGKALEWLADIWWDDKKDYNPSLKSRLTISKDTSKNQVVLKVTNMDPADTATYYCARSMITNWYFDVWGAGTTVTVSS

SEQ ID NO: 3478 - DNA, 759 bp, Artificial Sequence
  source: /note="Description of Artificial Sequence: Synthetic polynucleotide"
caagtcacactgcgtgaaagcggccctgccctggtcaagcccacccagaccctgaccctgacctgcaccttctccggcttcagcctggcccctacctcctccagcaccaagaaaacccagctgcagctcgaacatctgctgctggacctgcagatgatcctgaacggcatcaacaactacaagaaccccaagctgaccgccatgctgaccttcaagttctacatgcccaagaaggccaccgagctgaaacatctgcagtgcctggaagaggaactgaagcccctggaagaagtgctgaacctggcccagtccaagaacttccacctgaggcctcgggacctgatctccaacatcaacgtgatcgtgctggaactgaagggctccgagacaaccttcatgtgcgagtacgccgacgagacagccaccatcgtggaatttctgaaccggtggatcaccttctgccagtccatcatctccaccctgacctccacctccggcatgtccgtgggctggatccggcagcctcctggcaaggccctggagtggctggccgacatttggtgggacgacaagaaggactacaaccccagcctgaagtcccggctgaccatctccaaggacacctccaagaaccaagtggtgctgaaagtgaccaacatggaccccgccgacaccgccacctactactgcgcccggtccatgatcaccaactggtacttcgacgtgtggggcgctggcaccaccgtgaccgtgtcctct

SEQ ID NO: 3479 - protein, 583 aa, Artificial Sequence
  source: /note="Description of Artificial Sequence: Synthetic polypeptide"
QVTLRESGPALVKPTQTLTLTCTFSGFSLAPTSSSTKKTQLQLEHLLLDLQMILNGINNYKNPKLTAMLTFKFYMPKKATELKHLQCLEEELKPLEEVLNLAQSKNFHLRPRDLISNINVIVLELKGSETTFMCEYADETATIVEFLNRWITFCQSIISTLTSTSGMSVGWIRQPPGKALEWLADIWWDDKKDYNPSLKSRLTISKDTSKNQVVLKVTNMDPADTATYYCARSMITNWYFDVWGAGTTVTVSSASTKGPSVFPLAPSSKSTSGGTAALGCLVKDYFPEPVTVSWNSGALTSGVHTFPAVLQSSGLYSLSSVVTVPSSSLGTQTYICNVNHKPSNTKVDKRVEPKSCDKTHTCPPCPAPELLGGPSVFLFPPKPKDTLMISRTPEVTCVVVAVSHEDPEVKFNWYVDGVEVHNAKTKPREEQYNSTYRVVSVLTVLHQDWLNGKEYKCKVSNKALAAPIEKTISKAKGQPREPQVYTLPPSREEMTKNQVSLTCLVKGFYPSDIAVEWESNGQPENNYKTTPPVLDSDGSFFLYSKLTVDKSRWQQGNVFSCSVMHEALHNHYTQKSLSLSPGK

SEQ ID NO: 3480 - DNA, 1749 bp, Artificial Sequence
  source: /note="Description of Artificial Sequence: Synthetic polynucleotide"
caagtcacactgcgtgaaagcggccctgccctggtcaagcccacccagaccctgaccctgacctgcaccttctccggcttcagcctggcccctacctcctccagcaccaagaaaacccagctgcagctcgaacatctgctgctggacctgcagatgatcctgaacggcatcaacaactacaagaaccccaagctgaccgccatgctgaccttcaagttctacatgcccaagaaggccaccgagctgaaacatctgcagtgcctggaagaggaactgaagcccctggaagaagtgctgaacctggcccagtccaagaacttccacctgaggcctcgggacctgatctccaacatcaacgtgatcgtgctggaactgaagggctccgagacaaccttcatgtgcgagtacgccgacgagacagccaccatcgtggaatttctgaaccggtggatcaccttctgccagtccatcatctccaccctgacctccacctccggcatgtccgtgggctggatccggcagcctcctggcaaggccctggagtggctggccgacatttggtgggacgacaagaaggactacaaccccagcctgaagtcccggctgaccatctccaaggacacctccaagaaccaagtggtgctgaaagtgaccaacatggaccccgccgacaccgccacctactactgcgcccggtccatgatcaccaactggtacttcgacgtgtggggcgctggcaccaccgtgaccgtgtcctctgctagcaccaagggcccctccgtgttccctctggccccttccagcaagtctacctccggcggcacagctgctctgggctgcctggtcaaggactacttccctgagcctgtgacagtgtcctggaactctggcgccctgacctctggcgtgcacaccttccctgccgtgctgcagtcctccggcctgtactccctgtcctccgtggtcacagtgccttcaagcagcctgggcacccagacctatatctgcaacgtgaaccacaagccttccaacaccaaggtggacaagcgggtggagcctaagtcctgcgacaagacccacacctgtcctccctgccctgctcctgaactgctgggcggcccttctgtgttcctgttccctccaaagcccaaggacaccctgatgatctcccggacccctgaagtgacctgcgtggtggtggccgtgtcccacgaggatcctgaagtgaagttcaattggtacgtggacggcgtggaggtgcacaacgccaagaccaagcctcgggaggaacagtacaactccacctaccgggtggtgtccgtgctgaccgtgctgcaccaggactggctgaacggcaaagagtacaagtgcaaagtctccaacaaggccctggccgcccctatcgaaaagacaatctccaaggccaagggccagcctagggaaccccaggtgtacaccctgccacccagccgggaggaaatgaccaagaaccaggtgtccctgacctgtctggtcaagggcttctacccttccgatatcgccgtggagtgggagtctaacggccagcctgagaacaactacaagaccacccctcctgtgctggactccgacggctccttcttcctgtactccaaactgaccgtggacaagtcccggtggcagcagggcaacgtgttctcctgctccgtgatgcacgaggccctgcacaaccactacacccagaagtccctgtccctgtctcccggcaag

SEQ ID NO: 3481 - protein, 10 aa, Artificial Sequence
  source: /note="Description of Artificial Sequence: Synthetic peptide"
KAQLSVGYMH

SEQ ID NO: 3482 - protein, 7 aa, Artificial Sequence
  source: /note="Description of Artificial Sequence: Synthetic peptide"
DTSKLAS

SEQ ID NO: 3483 - protein, 9 aa, Artificial Sequence
  source: /note="Description of Artificial Sequence: Synthetic peptide"
FQGSGYPFT

SEQ ID NO: 3484 - protein, 10 aa, Artificial Sequence
  source: /note="Description of Artificial Sequence: Synthetic peptide"
KAQLSVGYMH

SEQ ID NO: 3485 - protein, 7 aa, Artificial Sequence
  source: /note="Description of Artificial Sequence: Synthetic peptide"
DTSKLAS

SEQ ID NO: 3486 - protein, 9 aa, Artificial Sequence
  source: /note="Description of Artificial Sequence: Synthetic peptide"
FQGSGYPFT

SEQ ID NO: 3487 - protein, 6 aa, Artificial Sequence
  source: /note="Description of Artificial Sequence: Synthetic peptide"
QLSVGY

SEQ ID NO: 3488 - protein, 3 aa, Artificial Sequence
  source: /note="Description of Artificial Sequence: Synthetic peptide"
DTS

SEQ ID NO: 3489 - protein, 6 aa, Artificial Sequence
  source: /note="Description of Artificial Sequence: Synthetic peptide"
GSGYPF

SEQ ID NO: 3490 - protein, 5 aa, Artificial Sequence
  source: /note="Description of Artificial Sequence: Synthetic peptide"
LSVGY

SEQ ID NO: 3491 - protein, 3 aa, Artificial Sequence
  source: /note="Description of Artificial Sequence: Synthetic peptide"
DTS

SEQ ID NO: 3492 - protein, 9 aa, Artificial Sequence
  source: /note="Description of Artificial Sequence: Synthetic peptide"
FQGSGYPFT

SEQ ID NO: 3493 - protein, 106 aa, Artificial Sequence; identical to SEQ ID NO: 15
  source: /note="Description of Artificial Sequence: Synthetic polypeptide"

SEQ ID NO: 3494 - DNA, 318 bp, Artificial Sequence; identical to SEQ ID NO: 3384
  source: /note="Description of Artificial Sequence: Synthetic polynucleotide"

SEQ ID NO: 3495 - protein, 213 aa, Artificial Sequence; identical to SEQ ID NO: 16
  source: /note="Description of Artificial Sequence: Synthetic polypeptide"

SEQ ID NO: 3496 - DNA, 639 bp, Artificial Sequence; identical to SEQ ID NO: 3386
  source: /note="Description of Artificial Sequence: Synthetic polynucleotide"

SEQ ID NO: 3497 - protein, 145 aa, Artificial Sequence
  source: /note="Description of Artificial Sequence: Synthetic polypeptide"
GFSLAPTSSSTKKTQLQLEHLLLDLQMILNGINNYKNPKLTRMLTAKFYMPKKATELKHLQCLEEELKPLEEVLNLAQSKNFHLRPRDLISNINVIVLELKGSETTFMCEYADETATIVEFLNRWITFCQSIISTLTSTSGMSVG

SEQ ID NO: 3498 - protein, 16 aa, Artificial Sequence
  source: /note="Description of Artificial Sequence: Synthetic peptide"
DIWWDDKKDYNPSLKS

SEQ ID NO: 3499 - protein, 10 aa, Artificial Sequence
  source: /note="Description of Artificial Sequence: Synthetic peptide"
SMITNWYFDV

SEQ ID NO: 3500 - protein, 141 aa, Artificial Sequence
  source: /note="Description of Artificial Sequence: Synthetic polypeptide"
APTSSSTKKTQLQLEHLLLDLQMILNGINNYKNPKLTRMLTAKFYMPKKATELKHLQCLEEELKPLEEVLNLAQSKNFHLRPRDLISNINVIVLELKGSETTFMCEYADETATIVEFLNRWITFCQSIISTLTSTSGMSVG

SEQ ID NO: 3501 - protein, 16 aa, Artificial Sequence
  source: /note="Description of Artificial Sequence: Synthetic peptide"
DIWWDDKKDYNPSLKS

SEQ ID NO: 3502 - protein, 10 aa, Artificial Sequence
  source: /note="Description of Artificial Sequence: Synthetic peptide"
SMITNWYFDV

SEQ ID NO: 3503 - protein, 142 aa, Artificial Sequence
  source: /note="Description of Artificial Sequence: Synthetic polypeptide"
GFSLAPTSSSTKKTQLQLEHLLLDLQMILNGINNYKNPKLTRMLTAKFYMPKKATELKHLQCLEEELKPLEEVLNLAQSKNFHLRPRDLISNINVIVLELKGSETTFMCEYADETATIVEFLNRWITFCQSIISTLTSTSGM

SEQ ID NO: 3504 - protein, 5 aa, Artificial Sequence
  source: /note="Description of Artificial Sequence: Synthetic peptide"
WWDDK

SEQ ID NO: 3505 - protein, 10 aa, Artificial Sequence
  source: /note="Description of Artificial Sequence: Synthetic peptide"
SMITNWYFDV

SEQ ID NO: 3506 - protein, 143 aa, Artificial Sequence
  source: /note="Description of Artificial Sequence: Synthetic polypeptide"
GFSLAPTSSSTKKTQLQLEHLLLDLQMILNGINNYKNPKLTRMLTAKFYMPKKATELKHLQCLEEELKPLEEVLNLAQSKNFHLRPRDLISNINVIVLELKGSETTFMCEYADETATIVEFLNRWITFCQSIISTLTSTSGMS

SEQ ID NO: 3507 - protein, 7 aa, Artificial Sequence
  source: /note="Description of Artificial Sequence: Synthetic peptide"
IWWDDKK

SEQ ID NO: 3508 - protein, 12 aa, Artificial Sequence
  source: /note="Description of Artificial Sequence: Synthetic peptide"
ARSMITNWYFDV

SEQ ID NO: 3509 - protein, 253 aa, Artificial Sequence
  source: /note="Description of Artificial Sequence: Synthetic polypeptide"
QVTLRESGPALVKPTQTLTLTCTFSGFSLAPTSSSTKKTQLQLEHLLLDLQMILNGINNYKNPKLTRMLTAKFYMPKKATELKHLQCLEEELKPLEEVLNLAQSKNFHLRPRDLISNINVIVLELKGSETTFMCEYADETATIVEFLNRWITFCQSIISTLTSTSGMSVGWIRQPPGKALEWLADIWWDDKKDYNPSLKSRLTISKDTSKNQVVLKVTNMDPADTATYYCARSMITNWYFDVWGAGTTVTVSS

SEQ ID NO: 3510 - DNA, 759 bp, Artificial Sequence
  source: /note="Description of Artificial Sequence: Synthetic polynucleotide"
caagtcacactgcgtgaaagcggccctgccctggtcaagcccacccagaccctgaccctgacctgcaccttctccggcttcagcctggcccctacctcctccagcaccaagaaaacccagctgcagctcgaacatctgctgctggacctgcagatgatcctgaacggcatcaacaactacaagaaccccaagctgacccggatgctgaccgccaagttctacatgcccaagaaggccaccgagctgaaacatctgcagtgcctggaagaggaactgaagcccctggaagaagtgctgaacctggcccagtccaagaacttccacctgaggcctcgggacctgatctccaacatcaacgtgatcgtgctggaactgaagggctccgagacaaccttcatgtgcgagtacgccgacgagacagccaccatcgtggaatttctgaaccggtggatcaccttctgccagtccatcatctccaccctgacctccacctccggcatgtccgtgggctggatccggcagcctcctggcaaggccctggagtggctggccgacatttggtgggacgacaagaaggactacaaccccagcctgaagtcccggctgaccatctccaaggacacctccaagaaccaagtggtgctgaaagtgaccaacatggaccccgccgacaccgccacctactactgcgcccggtccatgatcaccaactggtacttcgacgtgtggggcgctggcaccaccgtgaccgtgtcctct

SEQ ID NO: 3511 - protein, 583 aa, Artificial Sequence
  source: /note="Description of Artificial Sequence: Synthetic polypeptide"
QVTLRESGPALVKPTQTLTLTCTFSGFSLAPTSSSTKKTQLQLEHLLLDLQMILNGINNYKNPKLTRMLTAKFYMPKKATELKHLQCLEEELKPLEEVLNLAQSKNFHLRPRDLISNINVIVLELKGSETTFMCEYADETATIVEFLNRWITFCQSIISTLTSTSGMSVGWIRQPPGKALEWLADIWWDDKKDYNPSLKSRLTISKDTSKNQVVLKVTNMDPADTATYYCARSMITNWYFDVWGAGTTVTVSSASTKGPSVFPLAPSSKSTSGGTAALGCLVKDYFPEPVTVSWNSGALTSGVHTFPAVLQSSGLYSLSSVVTVPSSSLGTQTYICNVNHKPSNTKVDKRVEPKSCDKTHTCPPCPAPELLGGPSVFLFPPKPKDTLMISRTPEVTCVVVAVSHEDPEVKFNWYVDGVEVHNAKTKPREEQYNSTYRVVSVLTVLHQDWLNGKEYKCKVSNKALAAPIEKTISKAKGQPREPQVYTLPPSREEMTKNQVSLTCLVKGFYPSDIAVEWESNGQPENNYKTTPPVLDSDGSFFLYSKLTVDKSRWQQGNVFSCSVMHEALHNHYTQKSLSLSPGK

SEQ ID NO: 3512 - DNA, 1749 bp, Artificial Sequence
  source: /note="Description of Artificial Sequence: Synthetic polynucleotide"
caagtcacactgcgtgaaagcggccctgccctggtcaagcccacccagaccctgaccctgacctgcaccttctccggcttcagcctggcccctacctcctccagcaccaagaaaacccagctgcagctcgaacatctgctgctggacctgcagatgatcctgaacggcatcaacaactacaagaaccccaagctgacccggatgctgaccgccaagttctacatgcccaagaaggccaccgagctgaaacatctgcagtgcctggaagaggaactgaagcccctggaagaagtgctgaacctggcccagtccaagaacttccacctgaggcctcgggacctgatctccaacatcaacgtgatcgtgctggaactgaagggctccgagacaaccttcatgtgcgagtacgccgacgagacagccaccatcgtggaatttctgaaccggtggatcaccttctgccagtccatcatctccaccctgacctccacctccggcatgtccgtgggctggatccggcagcctcctggcaaggccctggagtggctggccgacatttggtgggacgacaagaaggactacaaccccagcctgaagtcccggctgaccatctccaaggacacctccaagaaccaagtggtgctgaaagtgaccaacatggaccccgccgacaccgccacctactactgcgcccggtccatgatcaccaactggtacttcgacgtgtggggcgctggcaccaccgtgaccgtgtcctctgctagcaccaagggcccctccgtgttccctctggccccttccagcaagtctacctccggcggcacagctgctctgggctgcctggtcaaggactacttccctgagcctgtgacagtgtcctggaactctggcgccctgacctctggcgtgcacaccttccctgccgtgctgcagtcctccggcctgtactccctgtcctccgtggtcacagtgccttcaagcagcctgggcacccagacctatatctgcaacgtgaaccacaagccttccaacaccaaggtggacaagcgggtggagcctaagtcctgcgacaagacccacacctgtcctccctgccctgctcctgaactgctgggcggcccttctgtgttcctgttccctccaaagcccaaggacaccctgatgatctcccggacccctgaagtgacctgcgtggtggtggccgtgtcccacgaggatcctgaagtgaagttcaattggtacgtggacggcgtggaggtgcacaacgccaagaccaagcctcgggaggaacagtacaactccacctaccgggtggtgtccgtgctgaccgtgctgcaccaggactggctgaacggcaaagagtacaagtgcaaagtctccaacaaggccctggccgcccctatcgaaaagacaatctccaaggccaagggccagcctagggaaccccaggtgtacaccctgccacccagccgggaggaaatgaccaagaaccaggtgtccctgacctgtctggtcaagggcttctacccttccgatatcgccgtggagtgggagtctaacggccagcctgagaacaactacaagaccacccctcctgtgctggactccgacggctccttcttcctgtactccaaactgaccgtggacaagtcccggtggcagcagggcaacgtgttctcctgctccgtgatgcacgaggccctgcacaaccactacacccagaagtccctgtccctgtctcccggcaag

SEQ ID NO: 3513 - protein, 10 aa, Artificial Sequence
  source: /note="Description of Artificial Sequence: Synthetic peptide"
KAQLSVGYMH

SEQ ID NO: 3514 - protein, 7 aa, Artificial Sequence
  source: /note="Description of Artificial Sequence: Synthetic peptide"
DTSKLAS

SEQ ID NO: 3515 - protein, 9 aa, Artificial Sequence
  source: /note="Description of Artificial Sequence: Synthetic peptide"
FQGSGYPFT

SEQ ID NO: 3516 - protein, 10 aa, Artificial Sequence
  source: /note="Description of Artificial Sequence: Synthetic peptide"
KAQLSVGYMH

SEQ ID NO: 3517 - protein, 7 aa, Artificial Sequence
  source: /note="Description of Artificial Sequence: Synthetic peptide"
DTSKLAS

SEQ ID NO: 3518 - protein, 9 aa, Artificial Sequence
  source: /note="Description of Artificial Sequence: Synthetic peptide"
FQGSGYPFT

SEQ ID NO: 3519 - protein, 6 aa, Artificial Sequence
  source: /note="Description of Artificial Sequence: Synthetic peptide"
QLSVGY

SEQ ID NO: 3520 - protein, 3 aa, Artificial Sequence
  source: /note="Description of Artificial Sequence: Synthetic peptide"
DTS

SEQ ID NO: 3521 - protein, 6 aa, Artificial Sequence
  source: /note="Description of Artificial Sequence: Synthetic peptide"
GSGYPF

SEQ ID NO: 3522 - protein, 5 aa, Artificial Sequence
  source: /note="Description of Artificial Sequence: Synthetic peptide"
LSVGY

SEQ ID NO: 3523 - protein, 3 aa, Artificial Sequence
  source: /note="Description of Artificial Sequence: Synthetic peptide"
DTS

SEQ ID NO: 3524 - protein, 9 aa, Artificial Sequence
  source: /note="Description of Artificial Sequence: Synthetic peptide"
FQGSGYPFT

SEQ ID NO: 3525 - protein, 106 aa, Artificial Sequence; identical to SEQ ID NO: 15
  source: /note="Description of Artificial Sequence: Synthetic polypeptide"

SEQ ID NO: 3526 - DNA, 318 bp, Artificial Sequence; identical to SEQ ID NO: 3384
  source: /note="Description of Artificial Sequence: Synthetic polynucleotide"

SEQ ID NO: 3527 - protein, 213 aa, Artificial Sequence; identical to SEQ ID NO: 16
  source: /note="Description of Artificial Sequence: Synthetic polypeptide"

SEQ ID NO: 3528 - DNA, 639 bp, Artificial Sequence; identical to SEQ ID NO: 3386
  source: /note="Description of Artificial Sequence: Synthetic polynucleotide"

SEQ ID NO: 3529 - protein, 6 aa, Artificial Sequence
  source: /note="Description of Artificial Sequence: Synthetic peptide"
SGYSWN

SEQ ID NO: 3530 - protein, 16 aa, Artificial Sequence
  source: /note="Description of Artificial Sequence: Synthetic peptide"
SITYDGSTNYNPSVKG

SEQ ID NO: 3531 - protein, 12 aa, Artificial Sequence
  source: /note="Description of Artificial Sequence: Synthetic peptide"
GSHYFGHWHFAV

SEQ ID NO: 3532 - protein, 8 aa, Artificial Sequence
  source: /note="Description of Artificial Sequence: Synthetic peptide"
GYSITSGY

SEQ ID NO: 3533 - protein, 5 aa, Artificial Sequence
  source: /note="Description of Artificial Sequence: Synthetic peptide"
TYDGS

SEQ ID NO: 3534 - protein, 12 aa, Artificial Sequence
  source: /note="Description of Artificial Sequence: Synthetic peptide"
GSHYFGHWHFAV

SEQ ID NO: 3535 - protein, 121 aa, Artificial Sequence [sequence omitted]

SEQ ID NO: 3536 - DNA, 363 bp, Artificial Sequence
  source: /note="Description of Artificial Sequence: Synthetic polynucleotide"
gaagttcagctggttgaatctggtggtggtctggttcagccgggtggttctctgcgtctgtcttgcgctgtttctggttactctatcacctctggttactcttggaactggatccgtcaggctccgggtaaaggtctggaatgggttgcttctatcacctacgacggttctaccaactacaacccgtctgttaaaggtcgtatcaccatctctcgtgacgactctaaaaacaccttctacctgcagatgaactctctgcgtgctgaagacaccgctgtttactactgcgctcgtggttctcactacttcggtcactggcacttcgctgtttggggtcagggtaccctggttaccgtttcttct

SEQ ID NO: 3537 - protein, 451 aa, Artificial Sequence
  source: /note="Description of Artificial Sequence: Synthetic polypeptide"
EVQLVESGGGLVQPGGSLRLSCAVSGYSITSGYSWNWIRQAPGKGLEWVASITYDGSTNYNPSVKGRITISRDDSKNTFYLQMNSLRAEDTAVYYCARGSHYFGHWHFAVWGQGTLVTVSSASTKGPSVFPLAPSSKSTSGGTAALGCLVKDYFPEPVTVSWNSGALTSGVHTFPAVLQSSGLYSLSSVVTVPSSSLGTQTYICNVNHKPSNTKVDKRVEPKSCDKTHTCPPCPAPEAAGGPSVFLFPPKPKDTLMISRTPEVTCVVVDVSHEDPEVKFNWYVDGVEVHNAKTKPREEQYNSTYRVVSVLTVLHQDWLNGKEYKCKVSNKALPAPIEKTISKAKGQPREPQVYTLPPSREEMTKNQVSLTCLVKGFYPSDIAVEWESNGQPENNYKTTPPVLDSDGSFFLYSKLTVDKSRWQQGNVFSCSVMHEALHNHYTQKSLSLSPGK

SEQ ID NO: 3538 - protein, 15 aa, Artificial Sequence
  source: /note="Description of Artificial Sequence: Synthetic peptide"
RASQSVDYDGDSYMN

SEQ ID NO: 3539 - protein, 7 aa, Artificial Sequence
  source: /note="Description of Artificial Sequence: Synthetic peptide"
AASYLES

SEQ ID NO: 3540 - protein, 155 aa, Artificial Sequence
  source: /note="Description of Artificial Sequence: Synthetic polypeptide"
QQSHVPIQKVQDDTKTLIKTIVTRINDISHTQSVSSKQKVTGLDFIPGLHPILTLSKMDQTLAVYQQILTSMPSRNVIQISNDLENLRDLLHVLAFSKSCHLPWASGLETLDSLGGVLEASGYSTEVVALSRLQGSLQDMLWQLDLSPGCEDPYT

SEQ ID NO: 3541 - protein, 11 aa, Artificial Sequence
  source: /note="Description of Artificial Sequence: Synthetic peptide"
SQSVDYDGDSY

SEQ ID NO: 3542 - protein, 3 aa, Artificial Sequence
  source: /note="Description of Artificial Sequence: Synthetic peptide"
AAS

SEQ ID NO: 3543 - protein, 152 aa, Artificial Sequence
  source: /note="Description of Artificial Sequence: Synthetic polypeptide"
SHVPIQKVQDDTKTLIKTIVTRINDISHTQSVSSKQKVTGLDFIPGLHPILTLSKMDQTLAVYQQILTSMPSRNVIQISNDLENLRDLLHVLAFSKSCHLPWASGLETLDSLGGVLEASGYSTEVVALSRLQGSLQDMLWQLDLSPGCEDPY

SEQ ID NO: 3544 - protein, 257 aa, Artificial Sequence
  source: /note="Description of Artificial Sequence: Synthetic polypeptide"
DIQLTQSPSSLSASVGDRVTITCRASQSVDYDGDSYMNWYQQKPGKAPKLLIYAASYLESGVPSRFSGSGSGTDFTLTISSLQPEDFATYYCQQSHVPIQKVQDDTKTLIKTIVTRINDISHTQSVSSKQKVTGLDFIPGLHPILTLSKMDQTLAVYQQILTSMPSRNVIQISNDLENLRDLLHVLAFSKSCHLPWASGLETLDSLGGVLEASGYSTEVVALSRLQGSLQDMLWQLDLSPGCEDPYTFGQGTKVEIK

SEQ ID NO: 3545 - DNA, 771 bp, Artificial Sequence
  source: /note="Description of Artificial Sequence: Synthetic polynucleotide"
gacatccaactgacccagagcccgagcagcctgagcgcgagcgtcggcgaccgcgttactattacgtgtcgtgcatcccaaagcgtggattacgatggtgacagctacatgaactggtatcagcagaaaccaggtaaggccccgaagctgttgatctatgctgcctcttatctggaatcgggcgtcccgagccgtttcagcggtagcggttccggcacggacttcaccttgaccatttccagcctgcagccggaagattttgcgacgtattactgccagcaaagccacgtgcccatccaaaaagtccaagatgacaccaaaaccctcatcaagacaattgtcaccaggatcaatgacatttcacacacgcagtcagtctcctccaaacagaaagtcaccggtttggacttcattcctgggctccaccccatcctgaccttatccaagatggaccagacactggcagtctaccaacagatcctcaccagtatgccttccagaaacgtgatccaaatatccaacgacctggagaacctccgggatcttcttcacgtgctggccttctctaagagctgccacttgccctgggccagtggcctggagaccttggacagcctggggggtgtcctggaagcttcaggctactccacagaggtggtggccctgagcaggctgcaggggtctctgcaggacatgctgtggcagctggacctcagccctgggtgcgaggatccgtacacctttggtcaaggcacgaaagttgagatcaaa

SEQ ID NO: 3546 - protein, 364 aa, Artificial Sequence
  source: /note="Description of Artificial Sequence: Synthetic polypeptide"
DIQLTQSPSSLSASVGDRVTITCRASQSVDYDGDSYMNWYQQKPGKAPKLLIYAASYLESGVPSRFSGSGSGTDFTLTISSLQPEDFATYYCQQSHVPIQKVQDDTKTLIKTIVTRINDISHTQSVSSKQKVTGLDFIPGLHPILTLSKMDQTLAVYQQILTSMPSRNVIQISNDLENLRDLLHVLAFSKSCHLPWASGLETLDSLGGVLEASGYSTEVVALSRLQGSLQDMLWQLDLSPGCEDPYTFGQGTKVEIKRTVAAPSVFIFPPSDEQLKSGTASVVCLLNNFYPREAKVQWKVDNALQSGNSQESVTEQDSKDSTYSLSSTLTLSKADYEKHKVYACEVTHQGLSSPVTKSFNRGEC

SEQ ID NO: 3547 - protein, 6 aa, Artificial Sequence
  source: /note="Description of Artificial Sequence: Synthetic peptide"
SGYSWN

SEQ ID NO: 3548 - protein, 16 aa, Artificial Sequence
  source: /note="Description of Artificial Sequence: Synthetic peptide"
SITYDGSTNYNPSVKG

SEQ ID NO: 3549 - protein, 158 aa, Artificial Sequence
  source: /note="Description of Artificial Sequence: Synthetic polypeptide"
GSHYFGVPIQKVQDDTKTLIKTIVTRINDISHTQSVSSKQKVTGLDFIPGLHPILTLSKMDQTLAVYQQILTSMPSRNVIQISNDLENLRDLLHVLAFSKSCHLPWASGLETLDSLGGVLEASGYSTEVVALSRLQGSLQDMLWQLDLSPGCHWHFAV

SEQ ID NO: 3550 - protein, 8 aa, Artificial Sequence
  source: /note="Description of Artificial Sequence: Synthetic peptide"
GYSITSGY

SEQ ID NO: 3551 - protein, 5 aa, Artificial Sequence
  source: /note="Description of Artificial Sequence: Synthetic peptide"
TYDGS

SEQ ID NO: 3552 - protein, 158 aa, Artificial Sequence; identical to SEQ ID NO: 3549
  source: /note="Description of Artificial Sequence: Synthetic polypeptide"

SEQ ID NO: 3553 - protein, 267 aa, Artificial Sequence
  source: /note="Description of Artificial Sequence: Synthetic polypeptide"
EVQLVESGGGLVQPGGSLRLSCAVSGYSITSGYSWNWIRQAPGKGLEWVASITYDGSTNYNPSVKGRITISRDDSKNTFYLQMNSLRAEDTAVYYCARGSHYFGVPIQKVQDDTKTLIKTIVTRINDISHTQSVSSKQKVTGLDFIPGLHPILTLSKMDQTLAVYQQILTSMPSRNVIQISNDLENLRDLLHVLAFSKSCHLPWASGLETLDSLGGVLEASGYSTEVVALSRLQGSLQDMLWQLDLSPGCHWHFAVWGQGTLVTVSS

SEQ ID NO: 3554 - DNA, 801 bp, Artificial Sequence
  source: /note="Description of Artificial Sequence: Synthetic polynucleotide"
gaagttcagctggttgaatctggtggtggtctggttcagccgggtggttctctgcgtctgtcttgcgctgtttctggttactctatcacctctggttactcttggaactggatccgtcaggctccgggtaaaggtctggaatgggttgcttctatcacctacgacggttctaccaactacaacccgtctgttaaaggtcgtatcaccatctctcgtgacgactctaaaaacaccttctacctgcagatgaactctctgcgtgctgaagacaccgctgtttactactgcgctcgtggttctcactacttcggtgtgcccatccaaaaagtccaagatgacaccaaaaccctcatcaagacaattgtcaccaggatcaatgacatttcacacacgcagtcagtctcctccaaacagaaagtcaccggtttggacttcattcctgggctccaccccatcctgaccttatccaagatggaccagacactggcagtctaccaacagatcctcaccagtatgccttccagaaacgtgatccaaatatccaacgacctggagaacctccgggatcttcttcacgtgctggccttctctaagagctgccacttgccctgggccagtggcctggagaccttggacagcctggggggtgtcctggaagcttcaggctactccacagaggtggtggccctgagcaggctgcaggggtctctgcaggacatgctgtggcagctggacctcagccctgggtgccactggcacttcgctgtttggggtcagggtaccctggttaccgtttcttct

SEQ ID NO: 3555 - protein, 597 aa, Artificial Sequence
  source: /note="Description of Artificial Sequence: Synthetic polypeptide"
EVQLVESGGGLVQPGGSLRLSCAVSGYSITSGYSWNWIRQAPGKGLEWVASITYDGSTNYNPSVKGRITISRDDSKNTFYLQMNSLRAEDTAVYYCARGSHYFGVPIQKVQDDTKTLIKTIVTRINDISHTQSVSSKQKVTGLDFIPGLHPILTLSKMDQTLAVYQQILTSMPSRNVIQISNDLENLRDLLHVLAFSKSCHLPWASGLETLDSLGGVLEASGYSTEVVALSRLQGSLQDMLWQLDLSPGCHWHFAVWGQGTLVTVSSASTKGPSVFPLAPSSKSTSGGTAALGCLVKDYFPEPVTVSWNSGALTSGVHTFPAVLQSSGLYSLSSVVTVPSSSLGTQTYICNVNHKPSNTKVDKRVEPKSCDKTHTCPPCPAPEAAGGPSVFLFPPKPKDTLMISRTPEVTCVVVDVSHEDPEVKFNWYVDGVEVHNAKTKPREEQYNSTYRVVSVLTVLHQDWLNGKEYKCKVSNKALPAPIEKTISKAKGQPREPQVYTLPPSREEMTKNQVSLTCLVKGFYPSDIAVEWESNGQPENNYKTTPPVLDSDGSFFLYSKLTVDKSRWQQGNVFSCSVMHEALHNHYTQKSLSLSPGK

SEQ ID NO: 3556 - protein, 15 aa, Artificial Sequence
  source: /note="Description of Artificial Sequence: Synthetic peptide"
RASQSVDYDGDSYMN

SEQ ID NO: 3557 - protein, 7 aa, Artificial Sequence
  source: /note="Description of Artificial Sequence: Synthetic peptide"
AASYLES

SEQ ID NO: 3558 - protein, 9 aa, Artificial Sequence
  source: /note="Description of Artificial Sequence: Synthetic peptide"
QQSHEDPYT

SEQ ID NO: 3559 - protein, 11 aa, Artificial Sequence
  source: /note="Description of Artificial Sequence: Synthetic peptide"
SQSVDYDGDSY

SEQ ID NO: 3560 - protein, 3 aa, Artificial Sequence
  source: /note="Description of Artificial Sequence: Synthetic peptide"
AAS

SEQ ID NO: 3561 - protein, 6 aa, Artificial Sequence
  source: /note="Description of Artificial Sequence: Synthetic peptide"
SHEDPY

SEQ ID NO: 3562 - protein, 111 aa, Artificial Sequence [sequence omitted]

SEQ ID NO: 3563 - DNA, 333 bp, Artificial Sequence
  source: /note="Description of Artificial Sequence: Synthetic polynucleotide"
gacatccaactgacccagagcccgagcagcctgagcgcgagcgtcggcgaccgcgttactattacgtgtcgtgcatcccaaagcgtggattacgatggtgacagctacatgaactggtatcagcagaaaccaggtaaggccccgaagctgttgatctatgctgcctcttatctggaatcgggcgtcccgagccgtttcagcggtagcggttccggcacggacttcaccttgaccatttccagcctgcagccggaagattttgcgacgtattactgccagcaaagccacgaggatccgtacacctttggtcaaggcacgaaagttgagatcaaa

SEQ ID NO: 3564 - protein, 218 aa, Artificial Sequence
  source: /note="Description of Artificial Sequence: Synthetic polypeptide"
DIQLTQSPSSLSASVGDRVTITCRASQSVDYDGDSYMNWYQQKPGKAPKLLIYAASYLESGVPSRFSGSGSGTDFTLTISSLQPEDFATYYCQQSHEDPYTFGQGTKVEIKRTVAAPSVFIFPPSDEQLKSGTASVVCLLNNFYPREAKVQWKVDNALQSGNSQESVTEQDSKDSTYSLSSTLTLSKADYEKHKVYACEVTHQGLSSPVTKSFNRGEC

SEQ ID NO: 3565 - protein, 6 aa, Artificial Sequence
  source: /note="Description of Artificial Sequence: Synthetic peptide"
SGYSWN

SEQ ID NO: 3566 - protein, 16 aa, Artificial Sequence
  source: /note="Description of Artificial Sequence: Synthetic peptide"
SITYDGSTNYNPSVKG

SEQ ID NO: 3567 - protein, 12 aa, Artificial Sequence
  source: /note="Description of Artificial Sequence: Synthetic peptide"
GSHYFGHWHFAV

SEQ ID NO: 3568 - protein, 8 aa, Artificial Sequence
  source: /note="Description of Artificial Sequence: Synthetic peptide"
GYSITSGY

SEQ ID NO: 3569 - protein, 5 aa, Artificial Sequence
  source: /note="Description of Artificial Sequence: Synthetic peptide"
TYDGS

SEQ ID NO: 3570 - protein, 12 aa, Artificial Sequence
  source: /note="Description of Artificial Sequence: Synthetic peptide"
GSHYFGHWHFAV

SEQ ID NO: 3571 - protein, 121 aa, Artificial Sequence [sequence omitted]

SEQ ID NO: 3572 - DNA, 363 bp, Artificial Sequence; identical to SEQ ID NO: 3536
  source: /note="Description of Artificial Sequence: Synthetic polynucleotide"

SEQ ID NO: 3573 - protein, 451 aa, Artificial Sequence; identical to SEQ ID NO: 3537
  source: /note="Description of Artificial Sequence: Synthetic polypeptide"

SEQ ID NO: 3574 - protein, 15 aa, Artificial Sequence
  source: /note="Description of Artificial Sequence: Synthetic peptide"
RASQSVDYDGDSYMN

SEQ ID NO: 3575 - protein, 7 aa, Artificial Sequence
  source: /note="Description of Artificial Sequence: Synthetic peptide"
AASYLES

SEQ ID NO: 3576 - protein, 196 aa, Artificial Sequence
  source: /note="Description of Artificial Sequence: Synthetic polypeptide"
QQSHMAFTEHSPLTPHRRDLCSRSIWLARKIRSDLTALTESYVKHQGLNKNINLDSADGMPVASTDQWSELTEAERLQENLQAYRTFHVLLARLLEDQQVHFTPTEGDFHQAIHTLLLQVAAFAYQIEELMILLEYKIPRNEADGMPINVGDGGLFEKKLWGLKVLQELSQWTVRSIHDLRFISSHQTGIPEDPYT

SEQ ID NO: 3577 - protein, 11 aa, Artificial Sequence
  source: /note="Description of Artificial Sequence: Synthetic peptide"
SQSVDYDGDSY

SEQ ID NO: 3578 - protein, 3 aa, Artificial Sequence
  source: /note="Description of Artificial Sequence: Synthetic peptide"
AAS

SEQ ID NO: 3579 - protein, 193 aa, Artificial Sequence
  source: /note="Description of Artificial Sequence: Synthetic polypeptide"
SHMAFTEHSPLTPHRRDLCSRSIWLARKIRSDLTALTESYVKHQGLNKNINLDSADGMPVASTDQWSELTEAERLQENLQAYRTFHVLLARLLEDQQVHFTPTEGDFHQAIHTLLLQVAAFAYQIEELMILLEYKIPRNEADGMPINVGDGGLFEKKLWGLKVLQELSQWTVRSIHDLRFISSHQTGIPEDPY

SEQ ID NO: 3580 - protein, 298 aa, Artificial Sequence
  source: /note="Description of Artificial Sequence: Synthetic polypeptide"
DIQLTQSPSSLSASVGDRVTITCRASQSVDYDGDSYMNWYQQKPGKAPKLLIYAASYLESGVPSRFSGSGSGTDFTLTISSLQPEDFATYYCQQSHMAFTEHSPLTPHRRDLCSRSIWLARKIRSDLTALTESYVKHQGLNKNINLDSADGMPVASTDQWSELTEAERLQENLQAYRTFHVLLARLLEDQQVHFTPTEGDFHQAIHTLLLQVAAFAYQIEELMILLEYKIPRNEADGMPINVGDGGLFEKKLWGLKVLQELSQWTVRSIHDLRFISSHQTGIPEDPYTFGQGTKVEIK

SEQ ID NO: 3581 - DNA, 894 bp, Artificial Sequence
  source: /note="Description of Artificial Sequence: Synthetic polynucleotide"
gacatccagctgacccagagcccgagcagcctgagcgcgagcgtcggcgaccgcgttactattacgtgtcgtgcatcccaaagcgtggattacgatggtgacagctacatgaactggtatcagcagaaaccaggtaaggccccgaagctgttgatctatgctgcctcttatctggaatcgggcgtcccgagccgtttcagcggtagcggttccggcacggacttcaccttgaccatttccagcctgcagccggaagattttgcgacgtattactgccagcaaagccacatggctttcacagagcattcaccgctgacccctcaccgtcgggacctctgtagccgctctatctggctagcaaggaagattcgttcagacctgactgctcttacggaatcctatgtgaagcatcagggcctgaacaagaacatcaacctggactctgcggatgggatgccagtggcaagcactgatcagtggagtgagctgaccgaggcagagcgactccaagagaaccttcaagcttatcgtaccttccatgttttgttggccaggctcttagaagaccagcaggtgcattttaccccaaccgaaggtgacttccatcaagctatacatacccttcttctccaagtcgctgcctttgcataccagatagaggagttaatgatactcctggaatacaagatcccccgcaatgaggctgatgggatgcctattaatgttggagatggtggtctctttgagaagaagctgtggggcctaaaggtgctgcaggagctttcacagtggacagtaaggtccatccatgaccttcgtttcatttcttctcatcagactgggatcccagaggatccgtacacctttggtcaaggcacgaaagttgagatcaaa

SEQ ID NO: 3582 - protein, 405 aa, Artificial Sequence
  source: /note="Description of Artificial Sequence: Synthetic polypeptide"
DIQLTQSPSSLSASVGDRVTITCRASQSVDYDGDSYMNWYQQKPGKAPKLLIYAASYLESGVPSRFSGSGSGTDFTLTISSLQPEDFATYYCQQSHMAFTEHSPLTPHRRDLCSRSIWLARKIRSDLTALTESYVKHQGLNKNINLDSADGMPVASTDQWSELTEAERLQENLQAYRTFHVLLARLLEDQQVHFTPTEGDFHQAIHTLLLQVAAFAYQIEELMILLEYKIPRNEADGMPINVGDGGLFEKKLWGLKVLQELSQWTVRSIHDLRFISSHQTGIPEDPYTFGQGTKVEIKRTVAAPSVFIFPPSDEQLKSGTASVVCLLNNFYPREAKVQWKVDNALQSGNSQESVTEQDSKDSTYSLSSTLTLSKADYEKHKVYACEVTHQGLSSPVTKSFNRGEC

SEQ ID NO: 3583 - protein, 6 aa, Artificial Sequence
  source: /note="Description of Artificial Sequence: Synthetic peptide"
SGYSWN

SEQ ID NO: 3584 - protein, 16 aa, Artificial Sequence
  source: /note="Description of Artificial Sequence: Synthetic peptide"
SITYDGSTNYNPSVKG

SEQ ID NO: 3585 - protein, 12 aa, Artificial Sequence
  source: /note="Description of Artificial Sequence: Synthetic peptide"
GSHYFGHWHFAV

SEQ ID NO: 3586 - protein, 8 aa, Artificial Sequence
  source: /note="Description of Artificial Sequence: Synthetic peptide"
GYSITSGY

SEQ ID NO: 3587 - protein, 5 aa, Artificial Sequence
  source: /note="Description of Artificial Sequence: Synthetic peptide"
TYDGS

SEQ ID NO: 3588 - protein, 12 aa, Artificial Sequence
  source: /note="Description of Artificial Sequence: Synthetic peptide"
GSHYFGHWHFAV

SEQ ID NO: 3589 - protein, 121 aa, Artificial Sequence [sequence omitted]

SEQ ID NO: 3590 - DNA, 363 bp, Artificial Sequence; identical to SEQ ID NO: 3536
  source: /note="Description of Artificial Sequence: Synthetic polynucleotide"

SEQ ID NO: 3591 - protein, 451 aa, Artificial Sequence; identical to SEQ ID NO: 3537
  source: /note="Description of Artificial Sequence: Synthetic polypeptide"

SEQ ID NO: 3592 - protein, 15 aa, Artificial Sequence
  source: /note="Description of Artificial Sequence: Synthetic peptide"
RASQSVDYDGDSYMN

SEQ ID NO: 3593 - protein, 7 aa, Artificial Sequence
  source: /note="Description of Artificial Sequence: Synthetic peptide"
AASYLES

SEQ ID NO: 3594 - protein, 142 aa, Artificial Sequence
  source: /note="Description of Artificial Sequence: Synthetic polypeptide"
QQSHAPTSSSTKKTQLQLEHLLLDLQMILNGINNYKNPKLTRMLTFKFYMPKKATELKHLQCLEEELKPLEEVLNLAQSKNFHLRPRDLISNINVIVLELKGSETTFMCEYADETATIVEFLNRWITFCQSIISTLTEDPYT

SEQ ID NO: 3595 - protein, 11 aa, Artificial Sequence
  source: /note="Description of Artificial Sequence: Synthetic peptide"
SQSVDYDGDSY

SEQ ID NO: 3596 - protein, 3 aa, Artificial Sequence
  source: /note="Description of Artificial Sequence: Synthetic peptide"
AAS

SEQ ID NO: 3597 - protein, 139 aa, Artificial Sequence
  source: /note="Description of Artificial Sequence: Synthetic polypeptide"
SHAPTSSSTKKTQLQLEHLLLDLQMILNGINNYKNPKLTRMLTFKFYMPKKATELKHLQCLEEELKPLEEVLNLAQSKNFHLRPRDLISNINVIVLELKGSETTFMCEYADETATIVEFLNRWITFCQSIISTLTEDPY

SEQ ID NO: 3598 - protein, 244 aa, Artificial Sequence
  source: /note="Description of Artificial Sequence: Synthetic polypeptide"
DIQLTQSPSSLSASVGDRVTITCRASQSVDYDGDSYMNWYQQKPGKAPKLLIYAASYLESGVPSRFSGSGSGTDFTLTISSLQPEDFATYYCQQSHAPTSSSTKKTQLQLEHLLLDLQMILNGINNYKNPKLTRMLTFKFYMPKKATELKHLQCLEEELKPLEEVLNLAQSKNFHLRPRDLISNINVIVLELKGSETTFMCEYADETATIVEFLNRWITFCQSIISTLTEDPYTFGQGTKVEIK

SEQ ID NO: 3599 - DNA, 732 bp, Artificial Sequence
  source: /note="Description of Artificial Sequence: Synthetic polynucleotide"
gacatccaactgacccagagcccgagcagcctgagcgcgagcgtcggcgaccgcgttactattacgtgtcgtgcatcccaaagcgtggattacgatggtgacagctacatgaactggtatcagcagaaaccaggtaaggccccgaagctgttgatctatgctgcctcttatctggaatcgggcgtcccgagccgtttcagcggtagcggttccggcacggacttcaccttgaccatttccagcctgcagccggaagattttgcgacgtattactgccagcaaagccacgcacctacttcaagttctacaaagaaaacacagctacaactggagcatttactgctggatttacagatgattttgaatggaattaataattacaagaatcccaaactcaccaggatgctcacatttaagttttacatgcccaagaaggccacagaactgaaacatcttcagtgtctagaagaagaactcaaacctctggaggaagtgctaaatttagctcaaagcaaaaactttcacttaagacccagggacttaatcagcaatatcaacgtaatagttctggaactaaagggatctgaaacaacattcatgtgtgaatatgctgatgagacagcaaccattgtagaatttctgaacagatggattaccttttgtcaaagcatcatctcaacactgactgaggatccgtacacctttggtcaaggcacgaaagttgagatcaaa

SEQ ID NO: 3600 - protein, 351 aa, Artificial Sequence
  source: /note="Description of Artificial Sequence: Synthetic polypeptide"
DIQLTQSPSSLSASVGDRVTITCRASQSVDYDGDSYMNWYQQKPGKAPKLLIYAASYLESGVPSRFSGSGSGTDFTLTISSLQPEDFATYYCQQSHAPTSSSTKKTQLQLEHLLLDLQMILNGINNYKNPKLTRMLTFKFYMPKKATELKHLQCLEEELKPLEEVLNLAQSKNFHLRPRDLISNINVIVLELKGSETTFMCEYADETATIVEFLNRWITFCQSIISTLTEDPYTFGQGTKVEIKRTVAAPSVFIFPPSDEQLKSGTASVVCLLNNFYPREAKVQWKVDNALQSGNSQESVTEQDSKDSTYSLSSTLTLSKADYEKHKVYACEVTHQGLSSPVTKSFNRGEC

SEQ ID NO: 3601 - protein, 172 aa, Artificial Sequence
  source: /note="Description of Artificial Sequence: Synthetic polypeptide"
SPGQGTQSENSCTHFPGNLPNMLRDLRDAFSRVKTFFQMKDQLDNLLLKESLLEDFKGYLGCQALSEMIQFYLEEVMPQAENQDPDIKAHVNSLGENLKTLRLRLRRCHRFLPCENGGGSGGKSKAVEQVKNAFNKLQEKGIYKAMSEFDIFINYIEAYMTMKIRNSGYSWN

SEQ ID NO: 3602 - protein, 16 aa, Artificial Sequence
  source: /note="Description of Artificial Sequence: Synthetic peptide"
SITYDGSTNYNPSVKG

SEQ ID NO: 3603 - protein, 12 aa, Artificial Sequence
  source: /note="Description of Artificial Sequence: Synthetic peptide"
GSHYFGHWHFAV

SEQ ID NO: 3604 - protein, 174 aa, Artificial Sequence
  source: /note="Description of Artificial Sequence: Synthetic polypeptide"
GYSITSPGQGTQSENSCTHFPGNLPNMLRDLRDAFSRVKTFFQMKDQLDNLLLKESLLEDFKGYLGCQALSEMIQFYLEEVMPQAENQDPDIKAHVNSLGENLKTLRLRLRRCHRFLPCENGGGSGGKSKAVEQVKNAFNKLQEKGIYKAMSEFDIFINYIEAYMTMKIRNSGY

SEQ ID NO: 3605 - protein, 5 aa, Artificial Sequence
  source: /note="Description of Artificial Sequence: Synthetic peptide"
TYDGS

SEQ ID NO: 3606 - protein, 12 aa, Artificial Sequence
  source: /note="Description of Artificial Sequence: Synthetic peptide"
GSHYFGHWHFAV

SEQ ID NO: 3607 - protein, 287 aa, Artificial Sequence
  source: /note="Description of Artificial Sequence: Synthetic polypeptide"
EVQLVESGGGLVQPGGSLRLSCAVSGYSITSPGQGTQSENSCTHFPGNLPNMLRDLRDAFSRVKTFFQMKDQLDNLLLKESLLEDFKGYLGCQALSEMIQFYLEEVMPQAENQDPDIKAHVNSLGENLKTLRLRLRRCHRFLPCENGGGSGGKSKAVEQVKNAFNKLQEKGIYKAMSEFDIFINYIEAYMTMKIRNSGYSWNWIRQAPGKGLEWVASITYDGSTNYNPSVKGRITISRDDSKNTFYLQMNSLRAEDTAVYYCARGSHYFGHWHFAVWGQGTLVTVSS

SEQ ID NO: 3608 - DNA, 861 bp, Artificial Sequence
  source: /note="Description of Artificial Sequence: Synthetic polynucleotide"
gaagttcagctggttgaatctggtggtggtctggttcagccgggtggttctctgcgtctgtcttgcgctgtttctggttactctatcaccagccccggacagggaacccaaagcgagaactcatgtacccacttccccggaaatcttcctaacatgcttcgggatcttagggatgctttctcccgggtcaagaccttctttcagatgaaggaccaacttgataatcttctgcttaaggaatcactgctggaggacttcaagggttatctgggatgccaggccctgtctgaaatgattcaattctacctcgaagaggtgatgccccaagccgagaaccaggaccctgacattaaggcacacgtcaattcactgggtgaaaatcttaagaccctgcggctcagactgcgccgctgccataggtttctcccgtgtgagaatggcggtggcagcggtgggaagtcaaaggcagtggaacaggtgaagaacgccttcaacaagctgcaagagaaaggaatctacaaagccatgtctgagttcgacatcttcatcaattacattgaggcctacatgaccatgaagatccgcaactctggttactcttggaactggatccgtcaggctccgggtaaaggtctggaatgggttgcttctatcacctacgacggttctaccaactacaacccgtctgttaaaggtcgtatcaccatctctcgtgacgactctaaaaacaccttctacctgcagatgaactctctgcgtgctgaagacaccgctgtttactactgcgctcgtggttctcactacttcggtcactggcacttcgctgtttggggtcagggtaccctggttaccgtttcttct

SEQ ID NO: 3609 - protein, 617 aa, Artificial Sequence
  source: /note="Description of Artificial Sequence: Synthetic polypeptide"
EVQLVESGGGLVQPGGSLRLSCAVSGYSITSPGQGTQSENSCTHFPGNLPNMLRDLRDAFSRVKTFFQMKDQLDNLLLKESLLEDFKGYLGCQALSEMIQFYLEEVMPQAENQDPDIKAHVNSLGENLKTLRLRLRRCHRFLPCENGGGSGGKSKAVEQVKNAFNKLQEKGIYKAMSEFDIFINYIEAYMTMKIRNSGYSWNWIRQAPGKGLEWVASITYDGSTNYNPSVKGRITISRDDSKNTFYLQMNSLRAEDTAVYYCARGSHYFGHWHFAVWGQGTLVTVSSASTKGPSVFPLAPSSKSTSGGTAALGCLVKDYFPEPVTVSWNSGALTSGVHTFPAVLQSSGLYSLSSVVTVPSSSLGTQTYICNVNHKPSNTKVDKRVEPKSCDKTHTCPPCPAPEAAGGPSVFLFPPKPKDTLMISRTPEVTCVVVDVSHEDPEVKFNWYVDGVEVHNAKTKPREEQYNSTYRVVSVLTVLHQDWLNGKEYKCKVSNKALPAPIEKTISKAKGQPREPQVYTLPPSREEMTKNQVSLTCLVKGFYPSDIAVEWESNGQPENNYKTTPPVLDSDGSFFLYSKLTVDKSRWQQGNVFSCSVMHEALHNHYTQKSLSLSPGK

SEQ ID NO: 3610 - protein, 15 aa, Artificial Sequence
  source: /note="Description of Artificial Sequence: Synthetic peptide"
RASQSVDYDGDSYMN

SEQ ID NO: 3611 - protein, 7 aa, Artificial Sequence
  source: /note="Description of Artificial Sequence: Synthetic peptide"
AASYLES

SEQ ID NO: 3612 - protein, 9 aa, Artificial Sequence
  source: /note="Description of Artificial Sequence: Synthetic peptide"
QQSHEDPYT

SEQ ID NO: 3613 - protein, 11 aa, Artificial Sequence
  source: /note="Description of Artificial Sequence: Synthetic peptide"
SQSVDYDGDSY

SEQ ID NO: 3614 - protein, 3 aa, Artificial Sequence
  source: /note="Description of Artificial Sequence: Synthetic peptide"
AAS

SEQ ID NO: 3615 - protein, 6 aa, Artificial Sequence
  source: /note="Description of Artificial Sequence: Synthetic peptide"
SHEDPY

SEQ ID NO: 3616 - protein, 111 aa, Artificial Sequence [sequence omitted]

SEQ ID NO: 3617 - DNA, 333 bp, Artificial Sequence; identical to SEQ ID NO: 3563
  source: /note="Description of Artificial Sequence: Synthetic polynucleotide"

SEQ ID NO: 3618 - protein, 218 aa, Artificial Sequence; identical to SEQ ID NO: 3564
  source: /note="Description of Artificial Sequence: Synthetic polypeptide"

SEQ ID NO: 3619 - protein, 6 aa, Artificial Sequence
  source: /note="Description of Artificial Sequence: Synthetic peptide"
SGYSWN

SEQ ID NO: 3620 - protein, 16 aa, Artificial Sequence
  source: /note="Description of Artificial Sequence: Synthetic peptide"
SITYDGSTNYNPSVKG

SEQ ID NO: 3621 - protein, 178 aa, Artificial Sequence
  source: /note="Description of Artificial Sequence: Synthetic polypeptide"
GSHYFGSPGQGTQSENSCTHFPGNLPNMLRDLRDAFSRVKTFFQMKDQLDNLLLKESLLEDFKGYLGCQALSEMIQFYLEEVMPQAENQDPDIKAHVNSLGENLKTLRLRLRRCHRFLPCENGGGSGGKSKAVEQVKNAFNKLQEKGIYKAMSEFDIFINYIEAYMTMKIRNHWHFAV

SEQ ID NO: 3622 - protein, 8 aa, Artificial Sequence
  source: /note="Description of Artificial Sequence: Synthetic peptide"
GYSITSGY

SEQ ID NO: 3623 - protein, 5 aa, Artificial Sequence
  source: /note="Description of Artificial Sequence: Synthetic peptide"
TYDGS

SEQ ID NO: 3624 - protein, 178 aa, Artificial Sequence; identical to SEQ ID NO: 3621
  source: /note="Description of Artificial Sequence: Synthetic polypeptide"

SEQ ID NO: 3625 - protein, 287 aa, Artificial Sequence
  source: /note="Description of Artificial Sequence: Synthetic polypeptide"
EVQLVESGGGLVQPGGSLRLSCAVSGYSITSGYSWNWIRQAPGKGLEWVASITYDGSTNYNPSVKGRITISRDDSKNTFYLQMNSLRAEDTAVYYCARGSHYFGSPGQGTQSENSCTHFPGNLPNMLRDLRDAFSRVKTFFQMKDQLDNLLLKESLLEDFKGYLGCQALSEMIQFYLEEVMPQAENQDPDIKAHVNSLGENLKTLRLRLRRCHRFLPCENGGGSGGKSKAVEQVKNAFNKLQEKGIYKAMSEFDIFINYIEAYMTMKIRNHWHFAVWGQGTLVTVSS

SEQ ID NO: 3626 - DNA, 861 bp, Artificial Sequence
  source: /note="Description of Artificial Sequence: Synthetic polynucleotide"
gaagttcagctggttgaatctggtggtggtctggttcagccgggtggttctctgcgtctgtcttgcgctgtttctggttactctatcacctctggttactcttggaactggatccgtcaggctccgggtaaaggtctggaatgggttgcttctatcacctacgacggttctaccaactacaacccgtctgttaaaggtcgtatcaccatctctcgtgacgactctaaaaacaccttctacctgcagatgaactctctgcgtgctgaagacaccgctgtttactactgcgctcgtggttctcactacttcggtagccccggacagggaacccaaagcgagaactcatgtacccacttccccggaaatcttcctaacatgcttcgggatcttagggatgctttctcccgggtcaagaccttctttcagatgaaggaccaacttgataatcttctgcttaaggaatcactgctggaggacttcaagggttatctgggatgccaggccctgtctgaaatgattcaattctacctcgaagaggtgatgccccaagccgagaaccaggaccctgacattaaggcacacgtcaattcactgggtgaaaatcttaagaccctgcggctcagactgcgccgctgccataggtttctcccgtgtgagaatggcggtggcagcggtgggaagtcaaaggcagtggaacaggtgaagaacgccttcaacaagctgcaagagaaaggaatctacaaagccatgtctgagttcgacatcttcatcaattacattgaggcctacatgaccatgaagatccgcaaccactggcacttcgctgtttggggtcagggtaccctggttaccgtttcttct

SEQ ID NO: 3627 - protein, 617 aa, Artificial Sequence
  source: /note="Description of Artificial Sequence: Synthetic polypeptide"
EVQLVESGGGLVQPGGSLRLSCAVSGYSITSGYSWNWIRQAPGKGLEWVASITYDGSTNYNPSVKGRITISRDDSKNTFYLQMNSLRAEDTAVYYCARGSHYFGSPGQGTQSENSCTHFPGNLPNMLRDLRDAFSRVKTFFQMKDQLDNLLLKESLLEDFKGYLGCQALSEMIQFYLEEVMPQAENQDPDIKAHVNSLGENLKTLRLRLRRCHRFLPCENGGGSGGKSKAVEQVKNAFNKLQEKGIYKAMSEFDIFINYIEAYMTMKIRNHWHFAVWGQGTLVTVSSASTKGPSVFPLAPSSKSTSGGTAALGCLVKDYFPEPVTVSWNSGALTSGVHTFPAVLQSSGLYSLSSVVTVPSSSLGTQTYICNVNHKPSNTKVDKRVEPKSCDKTHTCPPCPAPEAAGGPSVFLFPPKPKDTLMISRTPEVTCVVVDVSHEDPEVKFNWYVDGVEVHNAKTKPREEQYNSTYRVVSVLTVLHQDWLNGKEYKCKVSNKALPAPIEKTISKAKGQPREPQVYTLPPSREEMTKNQVSLTCLVKGFYPSDIAVEWESNGQPENNYKTTPPVLDSDGSFFLYSKLTVDKSRWQQGNVFSCSVMHEALHNHYTQKSLSLSPGK

SEQ ID NO: 3628 - protein, 15 aa, Artificial Sequence
  source: /note="Description of Artificial Sequence: Synthetic peptide"
RASQSVDYDGDSYMN

SEQ ID NO: 3629 - protein, 7 aa, Artificial Sequence
  source: /note="Description of Artificial Sequence: Synthetic peptide"
AASYLES

SEQ ID NO: 3630 - protein, 9 aa, Artificial Sequence
  source: /note="Description of Artificial Sequence: Synthetic peptide"
QQSHEDPYT

SEQ ID NO: 3631 - protein, 11 aa, Artificial Sequence
  source: /note="Description of Artificial Sequence: Synthetic peptide"
SQSVDYDGDSY

SEQ ID NO: 3632 - protein, 3 aa, Artificial Sequence
  source: /note="Description of Artificial Sequence: Synthetic peptide"
AAS

SEQ ID NO: 3633 - protein, 6 aa, Artificial Sequence
  source: /note="Description of Artificial Sequence: Synthetic peptide"
SHEDPY

SEQ ID NO: 3634 - protein, 111 aa, Artificial Sequence [sequence omitted]

SEQ ID NO: 3635 - DNA, 333 bp, Artificial Sequence; identical to SEQ ID NO: 3563
  source: /note="Description of Artificial Sequence: Synthetic polynucleotide"

SEQ ID NO: 3636 - protein, 218 aa, Artificial Sequence; identical to SEQ ID NO: 3564
  source: /note="Description of Artificial Sequence: Synthetic polypeptide"

SEQ ID NO: 3637 - protein, 6 aa, Artificial Sequence
  source: /note="Description of Artificial Sequence: Synthetic peptide"
SGYSWN

SEQ ID NO: 3638 - protein, 16 aa, Artificial Sequence
  source: /note="Description of Artificial Sequence: Synthetic peptide"
SITYDGSTNYNPSVKG

SEQ ID NO: 3639 - protein, 12 aa, Artificial Sequence
  source: /note="Description of Artificial Sequence: Synthetic peptide"
GSHYFGHWHFAV

SEQ ID NO: 3640 - protein, 8 aa, Artificial Sequence
  source: /note="Description of Artificial Sequence: Synthetic peptide"
GYSITSGY

SEQ ID NO: 3641 - protein, 5 aa, Artificial Sequence
  source: /note="Description of Artificial Sequence: Synthetic peptide"
TYDGS

SEQ ID NO: 3642 - protein, 12 aa, Artificial Sequence
  source: /note="Description of Artificial Sequence: Synthetic peptide"
GSHYFGHWHFAV

SEQ ID NO: 3643 - protein, 121 aa, Artificial Sequence [sequence omitted]

SEQ ID NO: 3644 - DNA, 363 bp, Artificial Sequence; identical to SEQ ID NO: 3536
  source: /note="Description of Artificial Sequence: Synthetic polynucleotide"

SEQ ID NO: 3645 - protein, 451 aa, Artificial Sequence; identical to SEQ ID NO: 3537
  source: /note="Description of Artificial Sequence: Synthetic polypeptide"

SEQ ID NO: 3646 - protein, 181 aa, Artificial Sequence
  source: /note="Description of Artificial Sequence: Synthetic polypeptide"
RASQSVDYSPGQGTQSENSCTHFPGNLPNMLRDLRDAFSRVKTFFQMKDQLDNLLLKESLLEDFKGYLGCQALSEMIQFYLEEVMPQAENQDPDIKAHVNSLGENLKTLRLRLRRCHRFLPCENGGGSGGKSKAVEQVKNAFNKLQEKGIYKAMSEFDIFINYIEAYMTMKIRNDGDSYMN

SEQ ID NO: 3647 - protein, 7 aa, Artificial Sequence
  source: /note="Description of Artificial Sequence: Synthetic peptide"
AASYLES

SEQ ID NO: 3648 - protein, 9 aa, Artificial Sequence
  source: /note="Description of Artificial Sequence: Synthetic peptide"
QQSHEDPYT

SEQ ID NO: 3649 - protein, 177 aa, Artificial Sequence
  source: /note="Description of Artificial Sequence: Synthetic polypeptide"
SQSVDYSPGQGTQSENSCTHFPGNLPNMLRDLRDAFSRVKTFFQMKDQLDNLLLKESLLEDFKGYLGCQALSEMIQFYLEEVMPQAENQDPDIKAHVNSLGENLKTLRLRLRRCHRFLPCENGGGSGGKSKAVEQVKNAFNKLQEKGIYKAMSEFDIFINYIEAYMTMKIRNDGDSY

SEQ ID NO: 3650 - protein, 3 aa, Artificial Sequence
  source: /note="Description of Artificial Sequence: Synthetic peptide"
AAS

SEQ ID NO: 3651 - protein, 6 aa, Artificial Sequence
  source: /note="Description of Artificial Sequence: Synthetic peptide"
SHEDPY

SEQ ID NO: 3652 - protein, 277 aa, Artificial Sequence
  source: /note="Description of Artificial Sequence: Synthetic polypeptide"
DIQLTQSPSSLSASVGDRVTITCRASQSVDYSPGQGTQSENSCTHFPGNLPNMLRDLRDAFSRVKTFFQMKDQLDNLLLKESLLEDFKGYLGCQALSEMIQFYLEEVMPQAENQDPDIKAHVNSLGENLKTLRLRLRRCHRFLPCENGGGSGGKSKAVEQVKNAFNKLQEKGIYKAMSEFDIFINYIEAYMTMKIRNDGDSYMNWYQQKPGKAPKLLIYAASYLESGVPSRFSGSGSGTDFTLTISSLQPEDFATYYCQQSHEDPYTFGQGTKVEIK

SEQ ID NO: 3653 - DNA, 831 bp, Artificial Sequence
  source: /note="Description of Artificial Sequence: Synthetic polynucleotide"
gacatccaactgacccagagcccgagcagcctgagcgcgagcgtcggcgaccgcgttactattacgtgtcgtgcatcccaaagcgtggattacagccccggacagggaacccaaagcgagaactcatgtacccacttccccggaaatcttcctaacatgcttcgggatcttagggatgctttctcccgggtcaagaccttctttcagatgaaggaccaacttgataatcttctgcttaaggaatcactgctggaggacttcaagggttatctgggatgccaggccctgtctgaaatgattcaattctacctcgaagaggtgatgccccaagccgagaaccaggaccctgacattaaggcacacgtcaattcactgggtgaaaatcttaagaccctgcggctcagactgcgccgctgccataggtttctcccgtgtgagaatggcggtggcagcggtgggaagtcaaaggcagtggaacaggtgaagaacgccttcaacaagctgcaagagaaaggaatctacaaagccatgtctgagttcgacatcttcatcaattacattgaggcctacatgaccatgaagatccgcaacgatggtgacagctacatgaactggtatcagcagaaaccaggtaaggccccgaagctgttgatctatgctgcctcttatctggaatcgggcgtcccgagccgtttcagcggtagcggttccggcacggacttcaccttgaccatttccagcctgcagccggaagattttgcgacgtattactgccagcaaagccacgaggatccgtacacctttggtcaaggcacgaaagttgagatcaaa

SEQ ID NO: 3654 - protein, 384 aa, Artificial Sequence
  source: /note="Description of Artificial Sequence: Synthetic polypeptide"
DIQLTQSPSSLSASVGDRVTITCRASQSVDYSPGQGTQSENSCTHFPGNLPNMLRDLRDAFSRVKTFFQMKDQLDNLLLKESLLEDFKGYLGCQALSEMIQFYLEEVMPQAENQDPDIKAHVNSLGENLKTLRLRLRRCHRFLPCENGGGSGGKSKAVEQVKNAFNKLQEKGIYKAMSEFDIFINYIEAYMTMKIRNDGDSYMNWYQQKPGKAPKLLIYAASYLESGVPSRFSGSGSGTDFTLTISSLQPEDFATYYCQQSHEDPYTFGQGTKVEIKRTVAAPSVFIFPPSDEQLKSGTASVVCLLNNFYPREAKVQWKVDNALQSGNSQESVTEQDSKDSTYSLSSTLTLSKADYEKHKVYACEVTHQGLSSPVTKSFNRGEC

SEQ ID NO: 3655 - protein, 6 aa, Artificial Sequence
  source: /note="Description of Artificial Sequence: Synthetic peptide"
SGYSWN

SEQ ID NO: 3656 - protein, 16 aa, Artificial Sequence
  source: /note="Description of Artificial Sequence: Synthetic peptide"
SITYDGSTNYNPSVKG

SEQ ID NO: 3657 - protein, 12 aa, Artificial Sequence
  source: /note="Description of Artificial Sequence: Synthetic peptide"
GSHYFGHWHFAV

SEQ ID NO: 3658 - protein, 8 aa, Artificial Sequence
  source: /note="Description of Artificial Sequence: Synthetic peptide"
GYSITSGY

SEQ ID NO: 3659 - protein, 5 aa, Artificial Sequence
  source: /note="Description of Artificial Sequence: Synthetic peptide"
TYDGS

SEQ ID NO: 3660 - protein, 12 aa, Artificial Sequence
  source: /note="Description of Artificial Sequence: Synthetic peptide"
GSHYFGHWHFAV

SEQ ID NO: 3661 - protein, 121 aa, Artificial Sequence [sequence omitted]

SEQ ID NO: 3662 - DNA, 363 bp, Artificial Sequence; identical to SEQ ID NO: 3536
  source: /note="Description of Artificial Sequence: Synthetic polynucleotide"

SEQ ID NO: 3663 - protein, 451 aa, Artificial Sequence; identical to SEQ ID NO: 3537
  source: /note="Description of Artificial Sequence: Synthetic polypeptide"

SEQ ID NO: 3664 - protein, 15 aa, Artificial Sequence
  source: /note="Description of Artificial Sequence: Synthetic peptide"
RASQSVDYDGDSYMN

SEQ ID NO: 3665 - protein, 7 aa, Artificial Sequence
  source: /note="Description of Artificial Sequence: Synthetic peptide"
AASYLES

SEQ ID NO: 3666 - protein, 175 aa, Artificial Sequence
  source: /note="Description of Artificial Sequence: Synthetic polypeptide"
QQSHSPGQGTQSENSCTHFPGNLPNMLRDLRDAFSRVKTFFQMKDQLDNLLLKESLLEDFKGYLGCQALSEMIQFYLEEVMPQAENQDPDIKAHVNSLGENLKTLRLRLRRCHRFLPCENGGGSGGKSKAVEQVKNAFNKLQEKGIYKAMSEFDIFINYIEAYMTMKIRNEDPYT

SEQ ID NO: 3667 - protein, 11 aa, Artificial Sequence
  source: /note="Description of Artificial Sequence: Synthetic peptide"
SQSVDYDGDSY

SEQ ID NO: 3668 - protein, 3 aa, Artificial Sequence
  source: /note="Description of Artificial Sequence: Synthetic peptide"
AAS

SEQ ID NO: 3669 - protein, 172 aa, Artificial Sequence
  source: /note="Description of Artificial Sequence: Synthetic polypeptide"
SHSPGQGTQSENSCTHFPGNLPNMLRDLRDAFSRVKTFFQMKDQLDNLLLKESLLEDFKGYLGCQALSEMIQFYLEEVMPQAENQDPDIKAHVNSLGENLKTLRLRLRRCHRFLPCENGGGSGGKSKAVEQVKNAFNKLQEKGIYKAMSEFDIFINYIEAYMTMKIRNEDPY

SEQ ID NO: 3670 - protein, 277 aa, Artificial Sequence
  source: /note="Description of Artificial Sequence: Synthetic polypeptide"
DIQLTQSPSSLSASVGDRVTITCRASQSVDYDGDSYMNWYQQKPGKAPKLLIYAASYLESGVPSRFSGSGSGTDFTLTISSLQPEDFATYYCQQSHSPGQGTQSENSCTHFPGNLPNMLRDLRDAFSRVKTFFQMKDQLDNLLLKESLLEDFKGYLGCQALSEMIQFYLEEVMPQAENQDPDIKAHVNSLGENLKTLRLRLRRCHRFLPCENGGGSGGKSKAVEQVKNAFNKLQEKGIYKAMSEFDIFINYIEAYMTMKIRNEDPYTFGQGTKVEIK

SEQ ID NO: 3671 - DNA, 831 bp, Artificial Sequence
  source: /note="Description of Artificial Sequence: Synthetic polynucleotide"
gacatccaactgacccagagcccgagcagcctgagcgcgagcgtcggcgaccgcgttactattacgtgtcgtgcatcccaaagcgtggattacgatggtgacagctacatgaactggtatcagcagaaaccaggtaaggccccgaagctgttgatctatgctgcctcttatctggaatcgggcgtcccgagccgtttcagcggtagcggttccggcacggacttcaccttgaccatttccagcctgcagccggaagattttgcgacgtattactgccagcaaagccacagccccggacagggaacccaaagcgagaactcatgtacccacttccccggaaatcttcctaacatgcttcgggatcttagggatgctttctcccgggtcaagaccttctttcagatgaaggaccaacttgataatcttctgcttaaggaatcactgctggaggacttcaagggttatctgggatgccaggccctgtctgaaatgattcaattctacctcgaagaggtgatgccccaagccgagaaccaggaccctgacattaaggcacacgtcaattcactgggtgaaaatcttaagaccctgcggctcagactgcgccgctgccataggtttctcccgtgtgagaatggcggtggcagcggtgggaagtcaaaggcagtggaacaggtgaagaacgccttcaacaagctgcaagagaaaggaatctacaaagccatgtctgagttcgacatcttcatcaattacattgaggcctacatgaccatgaagatccgcaacgaggatccgtacacctttggtcaaggcacgaaagttgagatcaaa

SEQ ID NO: 3672 - protein, 384 aa, Artificial Sequence
  source: /note="Description of Artificial Sequence: Synthetic polypeptide"
DIQLTQSPSSLSASVGDRVTITCRASQSVDYDGDSYMNWYQQKPGKAPKLLIYAASYLESGVPSRFSGSGSGTDFTLTISSLQPEDFATYYCQQSHSPGQGTQSENSCTHFPGNLPNMLRDLRDAFSRVKTFFQMKDQLDNLLLKESLLEDFKGYLGCQALSEMIQFYLEEVMPQAENQDPDIKAHVNSLGENLKTLRLRLRRCHRFLPCENGGGSGGKSKAVEQVKNAFNKLQEKGIYKAMSEFDIFINYIEAYMTMKIRNEDPYTFGQGTKVEIKRTVAAPSVFIFPPSDEQLKSGTASVVCLLNNFYPREAKVQWKVDNALQSGNSQESVTEQDSKDSTYSLSSTLTLSKADYEKHKVYACEVTHQGLSSPVTKSFNRGEC

SEQ ID NO: 3673 - protein, 172 aa, Artificial Sequence; identical to SEQ ID NO: 3601
  source: /note="Description of Artificial Sequence: Synthetic polypeptide"

SEQ ID NO: 3674 - protein, 16 aa, Artificial Sequence
  source: /note="Description of Artificial Sequence: Synthetic peptide"
SITYDGSTNYNPSVKG

SEQ ID NO: 3675 - protein, 12 aa, Artificial Sequence
  source: /note="Description of Artificial Sequence: Synthetic peptide"
GSHYFGHWHFAV

SEQ ID NO: 3676 - protein, 174 aa, Artificial Sequence; identical to SEQ ID NO: 3604
  source: /note="Description of Artificial Sequence: Synthetic polypeptide"

SEQ ID NO: 3677 - protein, 5 aa, Artificial Sequence
  source: /note="Description of Artificial Sequence: Synthetic peptide"
TYDGS

SEQ ID NO: 3678 - protein, 12 aa, Artificial Sequence
  source: /note="Description of Artificial Sequence: Synthetic peptide"
GSHYFGHWHFAV

SEQ ID NO: 3679 - protein, 287 aa, Artificial Sequence; identical to SEQ ID NO: 3607
  source: /note="Description of Artificial Sequence: Synthetic polypeptide"

SEQ ID NO: 3680 - DNA, 861 bp, Artificial Sequence; identical to SEQ ID NO: 3608
  source: /note="Description of Artificial Sequence: Synthetic polynucleotide"

SEQ ID NO: 3681 - protein, 617 aa, Artificial Sequence; identical to SEQ ID NO: 3609
  source: /note="Description of Artificial Sequence: Synthetic polypeptide"

SEQ ID NO: 3682 - protein, 181 aa, Artificial Sequence; identical to SEQ ID NO: 3646
  source: /note="Description of Artificial Sequence: Synthetic polypeptide"

SEQ ID NO: 3683 - protein, 7 aa, Artificial Sequence
  source: /note="Description of Artificial Sequence: Synthetic peptide"
AASYLES

SEQ ID NO: 3684 - protein, 9 aa, Artificial Sequence
  source: /note="Description of Artificial Sequence: Synthetic peptide"
QQSHEDPYT

SEQ ID NO: 3685 - protein, 177 aa, Artificial Sequence; identical to SEQ ID NO: 3649
  source: /note="Description of Artificial Sequence: Synthetic polypeptide"

SEQ ID NO: 3686 - protein, 3 aa, Artificial Sequence
  source: /note="Description of Artificial Sequence: Synthetic peptide"
AAS

SEQ ID NO: 3687 - protein, 6 aa, Artificial Sequence
  source: /note="Description of Artificial Sequence: Synthetic peptide"
SHEDPY

SEQ ID NO: 3688 - protein, 277 aa, Artificial Sequence; identical to SEQ ID NO: 3652
  source: /note="Description of Artificial Sequence: Synthetic polypeptide"

SEQ ID NO: 3689 - DNA, 831 bp, Artificial Sequence; identical to SEQ ID NO: 3653
  source: /note="Description of Artificial Sequence: Synthetic polynucleotide"

SEQ ID NO: 3690 - protein, 384 aa, Artificial Sequence; identical to SEQ ID NO: 3654
  source: /note="Description of Artificial Sequence: Synthetic polypeptide"

SEQ ID NO: 3691 - protein, 6 aa, Artificial Sequence
  source: /note="Description of Artificial Sequence: Synthetic peptide"
SGYSWN

SEQ ID NO: 3692 - protein, 16 aa, Artificial Sequence
  source: /note="Description of Artificial Sequence: Synthetic peptide"
SITYDGSTNYNPSVKG

SEQ ID NO: 3693 - protein, 178 aa, Artificial Sequence; identical to SEQ ID NO: 3621
  source: /note="Description of Artificial Sequence: Synthetic polypeptide"

SEQ ID NO: 3694 - protein, 8 aa, Artificial Sequence
  source: /note="Description of Artificial Sequence: Synthetic peptide"
GYSITSGY

SEQ ID NO: 3695 - protein, 5 aa, Artificial Sequence
  source: /note="Description of Artificial Sequence: Synthetic peptide"
TYDGS

SEQ ID NO: 3696 - protein, 178 aa, Artificial Sequence; identical to SEQ ID NO: 3621
  source: /note="Description of Artificial Sequence: Synthetic polypeptide"

SEQ ID NO: 3697 - protein, 287 aa, Artificial Sequence; identical to SEQ ID NO: 3625
  source: /note="Description of Artificial Sequence: Synthetic polypeptide"

SEQ ID NO: 3698 - DNA, 861 bp, Artificial Sequence; identical to SEQ ID NO: 3626
  source: /note="Description of Artificial Sequence: Synthetic polynucleotide"

SEQ ID NO: 3699 - protein, 617 aa, Artificial Sequence; identical to SEQ ID NO: 3627
  source: /note="Description of Artificial Sequence: Synthetic polypeptide"

SEQ ID NO: 3700 - protein, 181 aa, Artificial Sequence; identical to SEQ ID NO: 3646
  source: /note="Description of Artificial Sequence: Synthetic polypeptide"

SEQ ID NO: 3701 - protein, 7 aa, Artificial Sequence
  source: /note="Description of Artificial Sequence: Synthetic peptide"
AASYLES

SEQ ID NO: 3702 - protein, 9 aa, Artificial Sequence
  source: /note="Description of Artificial Sequence: Synthetic peptide"
QQSHEDPYT

SEQ ID NO: 3703 - protein, 177 aa, Artificial Sequence; identical to SEQ ID NO: 3649
  source: /note="Description of Artificial Sequence: Synthetic polypeptide"

SEQ ID NO: 3704 - protein, 3 aa, Artificial Sequence
  source: /note="Description of Artificial Sequence: Synthetic peptide"
AAS

SEQ ID NO: 3705 - protein, 6 aa, Artificial Sequence
  source: /note="Description of Artificial Sequence: Synthetic peptide"
SHEDPY

SEQ ID NO: 3706 - protein, 277 aa, Artificial Sequence; identical to SEQ ID NO: 3652
  source: /note="Description of Artificial Sequence: Synthetic polypeptide"

SEQ ID NO: 3707 - DNA, 831 bp, Artificial Sequence; identical to SEQ ID NO: 3653
  source: /note="Description of Artificial Sequence: Synthetic polynucleotide"

SEQ ID NO: 3708 - protein, 384 aa, Artificial Sequence; identical to SEQ ID NO: 3654
  source: /note="Description of Artificial Sequence: Synthetic polypeptide"

SEQ ID NO: 3709 - protein, 172 aa, Artificial Sequence; identical to SEQ ID NO: 3601
  source: /note="Description of Artificial Sequence: Synthetic polypeptide"

SEQ ID NO: 3710 - protein, 16 aa, Artificial Sequence
  source: /note="Description of Artificial Sequence: Synthetic peptide"
SITYDGSTNYNPSVKG

SEQ ID NO: 3711 - protein, 12 aa, Artificial Sequence
  source: /note="Description of Artificial Sequence: Synthetic peptide"
GSHYFGHWHFAV

SEQ ID NO: 3712 - protein, 174 aa, Artificial Sequence; identical to SEQ ID NO: 3604
  source: /note="Description of Artificial Sequence: Synthetic polypeptide"

SEQ ID NO: 3713 - protein, 5 aa, Artificial Sequence
  source: /note="Description of Artificial Sequence: Synthetic peptide"
TYDGS

SEQ ID NO: 3714 - protein, 12 aa, Artificial Sequence
  source: /note="Description of Artificial Sequence: Synthetic peptide"
GSHYFGHWHFAV

SEQ ID NO: 3715 - protein, 287 aa, Artificial Sequence; identical to SEQ ID NO: 3607
  source: /note="Description of Artificial Sequence: Synthetic polypeptide"

SEQ ID NO: 3716 - DNA, 861 bp, Artificial Sequence; identical to SEQ ID NO: 3608
  source: /note="Description of Artificial Sequence: Synthetic polynucleotide"

SEQ ID NO: 3717 - protein, 617 aa, Artificial Sequence; identical to SEQ ID NO: 3609
  source: /note="Description of Artificial Sequence: Synthetic polypeptide"

SEQ ID NO: 3718 - protein, 15 aa, Artificial Sequence
  source: /note="Description of Artificial Sequence: Synthetic peptide"
RASQSVDYDGDSYMN

SEQ ID NO: 3719 - protein, 7 aa, Artificial Sequence
  source: /note="Description of Artificial Sequence: Synthetic peptide"
AASYLES

SEQ ID NO: 3720 - protein, 175 aa, Artificial Sequence; identical to SEQ ID NO: 3666
  source: /note="Description of Artificial Sequence: Synthetic polypeptide"

SEQ ID NO: 3721 - protein, 11 aa, Artificial Sequence
  source: /note="Description of Artificial Sequence: Synthetic peptide"
SQSVDYDGDSY

SEQ ID NO: 3722 - protein, 3 aa, Artificial Sequence
  source: /note="Description of Artificial Sequence: Synthetic peptide"
AAS

SEQ ID NO: 3723 - protein, 172 aa, Artificial Sequence; identical to SEQ ID NO: 3669
  source: /note="Description of Artificial Sequence: Synthetic polypeptide"

SEQ ID NO: 3724 - protein, 277 aa, Artificial Sequence; identical to SEQ ID NO: 3670
  source: /note="Description of Artificial Sequence: Synthetic polypeptide"

SEQ ID NO: 3725 - DNA, 831 bp, Artificial Sequence; identical to SEQ ID NO: 3671
  source: /note="Description of Artificial Sequence: Synthetic polynucleotide"

SEQ ID NO: 3726 - protein, 384 aa, Artificial Sequence; identical to SEQ ID NO: 3672
  source: /note="Description of Artificial Sequence: Synthetic polypeptide"

SEQ ID NO: 3727 - protein, 6 aa, Artificial Sequence
  source: /note="Description of Artificial Sequence: Synthetic peptide"
SGYSWN

SEQ ID NO: 3728 - protein, 16 aa, Artificial Sequence
  source: /note="Description of Artificial Sequence: Synthetic peptide"
SITYDGSTNYNPSVKG

SEQ ID NO: 3729 - protein, 178 aa, Artificial Sequence; identical to SEQ ID NO: 3621
  source: /note="Description of Artificial Sequence: Synthetic polypeptide"

SEQ ID NO: 3730 - protein, 8 aa, Artificial Sequence
  source: /note="Description of Artificial Sequence: Synthetic peptide"
GYSITSGY

SEQ ID NO: 3731 - protein, 5 aa, Artificial Sequence
  source: /note="Description of Artificial Sequence: Synthetic peptide"
TYDGS

SEQ ID NO: 3732 - protein, 178 aa, Artificial Sequence; identical to SEQ ID NO: 3621
  source: /note="Description of Artificial Sequence: Synthetic polypeptide"

SEQ ID NO: 3733 - protein, 287 aa, Artificial Sequence; identical to SEQ ID NO: 3625
  source: /note="Description of Artificial Sequence: Synthetic polypeptide"

SEQ ID NO: 3734 - DNA, 861 bp, Artificial Sequence; identical to SEQ ID NO: 3626
  source: /note="Description of Artificial Sequence: Synthetic polynucleotide"

SEQ ID NO: 3735 - protein, 617 aa, Artificial Sequence; identical to SEQ ID NO: 3627
  source: /note="Description of Artificial Sequence: Synthetic polypeptide"

SEQ ID NO: 3736 - protein, 15 aa, Artificial Sequence
  source: /note="Description of Artificial Sequence: Synthetic peptide"
RASQSVDYDGDSYMN

SEQ ID NO: 3737 - protein, 7 aa, Artificial Sequence
  source: /note="Description of Artificial Sequence: Synthetic peptide"
AASYLES

SEQ ID NO: 3738 - protein, 175 aa, Artificial Sequence; identical to SEQ ID NO: 3666
  source: /note="Description of Artificial Sequence: Synthetic polypeptide"

SEQ ID NO: 3739 - protein, 11 aa, Artificial Sequence
  source: /note="Description of Artificial Sequence: Synthetic peptide"
SQSVDYDGDSY

SEQ ID NO: 3740 - protein, 3 aa, Artificial Sequence
  source: /note="Description of Artificial Sequence: Synthetic peptide"
AAS

SEQ ID NO: 3741 - protein, 172 aa, Artificial Sequence; identical to SEQ ID NO: 3669
  source: /note="Description of Artificial Sequence: Synthetic polypeptide"

SEQ ID NO: 3742 - protein, 277 aa, Artificial Sequence; identical to SEQ ID NO: 3670
  source: /note="Description of Artificial Sequence: Synthetic polypeptide"

SEQ ID NO: 3743 - DNA, 831 bp, Artificial Sequence; identical to SEQ ID NO: 3671
  source: /note="Description of Artificial Sequence: Synthetic polynucleotide"

SEQ ID NO: 3744 - protein, 384 aa, Artificial Sequence; identical to SEQ ID NO: 3672
  source: /note="Description of Artificial Sequence: Synthetic polypeptide"

SEQ ID NO: 3745 - protein, 172 aa, Artificial Sequence; identical to SEQ ID NO: 3601
  source: /note="Description of Artificial Sequence: Synthetic polypeptide"

SEQ ID NO: 3746 - protein, 16 aa, Artificial Sequence
  source: /note="Description of Artificial Sequence: Synthetic peptide"
SITYDGSTNYNPSVKG

SEQ ID NO: 3747 - protein, 12 aa, Artificial Sequence
  source: /note="Description of Artificial Sequence: Synthetic peptide"
GSHYFGHWHFAV

SEQ ID NO: 3748 - protein, 174 aa, Artificial Sequence; identical to SEQ ID NO: 3604
  source: /note="Description of Artificial Sequence: Synthetic polypeptide"

SEQ ID NO: 3749 - protein, 5 aa, Artificial Sequence
  source: /note="Description of Artificial Sequence: Synthetic peptide"
TYDGS

SEQ ID NO: 3750 - protein, 12 aa, Artificial Sequence
  source: /note="Description of Artificial Sequence: Synthetic peptide"
GSHYFGHWHFAV

SEQ ID NO: 3751 - protein, 287 aa, Artificial Sequence; identical to SEQ ID NO: 3607
  source: /note="Description of Artificial Sequence: Synthetic polypeptide"

SEQ ID NO: 3752 - DNA, 861 bp, Artificial Sequence; identical to SEQ ID NO: 3608
  source: /note="Description of Artificial Sequence: Synthetic polynucleotide"

SEQ ID NO: 3753 - protein, 617 aa, Artificial Sequence
  source: /note="Description of Artificial Sequence: Synthetic polypeptide"
EVQLVESGGGLVQPGGSLRLSCAVSGYSITSPGQGTQSENSCTHFPGNLPNMLRDLRDAFSRVKTFFQMKDQLDNLLLKESLLEDFKGYLGCQALSEMIQFYLEEVMPQAENQDPDIKAHVNSLGENLKTLRLRLRRCHRFLPCENGGGSGGKSKAVEQVKNAFNKLQEKGIYKAMSEFDIFINYIEAYMTMKIRNSGYSWNWIRQAPGKGLEWVASITYDGSTNYNPSVKGRITISRDDSKNTFYLQMNSLRAEDTAVYYCARGSHYFGHWHFAVWGQGTLVTVSSASTKGPSVFPLAPSSKSTSGGTAALGCLVKDYFPEPVTVSWNSGALTSGVHTFPAVLQSSGLYSLSSVVTVPSSSLGTQTYICNVNHKPSNTKVDKRVEPKSCDKTHTCPPCPAPELLGGPSVFLFPPKPKDTLMISRTPEVTCVVVDVSHEDPEVKFNWYVDGVEVHNAKTKPREEQYNSTYRVVSVLTVLHQDWLNGKEYKCKVSNKALPAPIEKTISKAKGQPREPQVYTLPPSREEMTKNQVSLTCLVKGFYPSDIAVEWESNGQPENNYKTTPPVLDSDGSFFLYSKLTVDKSRWQQGNVFSCSVMHEALHNHYTQKSLSLSPGK

SEQ ID NO: 3754 - protein, 15 aa, Artificial Sequence
  source: /note="Description of Artificial Sequence: Synthetic peptide"
RASQSVDYDGDSYMN

SEQ ID NO: 3755 - protein, 7 aa, Artificial Sequence
  source: /note="Description of Artificial Sequence: Synthetic peptide"
AASYLES

SEQ ID NO: 3756 - protein, 9 aa, Artificial Sequence
  source: /note="Description of Artificial Sequence: Synthetic peptide"
QQSHEDPYT

SEQ ID NO: 3757 - protein, 11 aa, Artificial Sequence
  source: /note="Description of Artificial Sequence: Synthetic peptide"
SQSVDYDGDSY

SEQ ID NO: 3758 - protein, 3 aa, Artificial Sequence
  source: /note="Description of Artificial Sequence: Synthetic peptide"
AAS

SEQ ID NO: 3759 - protein, 6 aa, Artificial Sequence
  source: /note="Description of Artificial Sequence: Synthetic peptide"
SHEDPY

SEQ ID NO: 3760 - protein, 111 aa, Artificial Sequence [sequence omitted]

SEQ ID NO: 3761 - DNA, 333 bp, Artificial Sequence; identical to SEQ ID NO: 3563
  source: /note="Description of Artificial Sequence: Synthetic polynucleotide"

SEQ ID NO: 3762 - protein, 218 aa, Artificial Sequence; identical to SEQ ID NO: 3564
  source: /note="Description of Artificial Sequence: Synthetic polypeptide"

SEQ ID NO: 3763 - protein, 6 aa, Artificial Sequence
  source: /note="Description of Artificial Sequence: Synthetic peptide"
SGYSWN

SEQ ID NO: 3764 - protein, 16 aa, Artificial Sequence
  source: /note="Description of Artificial Sequence: Synthetic peptide"
SITYDGSTNYNPSVKG

SEQ ID NO: 3765 - protein, 178 aa, Artificial Sequence; identical to SEQ ID NO: 3621
  source: /note="Description of Artificial Sequence: Synthetic polypeptide"

SEQ ID NO: 3766 - protein, 8 aa, Artificial Sequence
  source: /note="Description of Artificial Sequence: Synthetic peptide"
GYSITSGY

SEQ ID NO: 3767 - protein, 5 aa, Artificial Sequence
  source: /note="Description of Artificial Sequence: Synthetic peptide"
TYDGS

SEQ ID NO: 3768 - protein, 178 aa, Artificial Sequence; identical to SEQ ID NO: 3621
  source: /note="Description of Artificial Sequence: Synthetic polypeptide"

SEQ ID NO: 3769 - protein, 287 aa, Artificial Sequence; identical to SEQ ID NO: 3625
  source: /note="Description of Artificial Sequence: Synthetic polypeptide"

SEQ ID NO: 3770 - DNA, 861 bp, Artificial Sequence; identical to SEQ ID NO: 3626
  source: /note="Description of Artificial Sequence: Synthetic polynucleotide"

SEQ ID NO: 3771 - protein, 617 aa, Artificial Sequence
  source: /note="Description of Artificial Sequence: Synthetic polypeptide"
EVQLVESGGGLVQPGGSLRLSCAVSGYSITSGYSWNWIRQAPGKGLEWVASITYDGSTNYNPSVKGRITISRDDSKNTFYLQMNSLRAEDTAVYYCARGSHYFGSPGQGTQSENSCTHFPGNLPNMLRDLRDAFSRVKTFFQMKDQLDNLLLKESLLEDFKGYLGCQALSEMIQFYLEEVMPQAENQDPDIKAHVNSLGENLKTLRLRLRRCHRFLPCENGGGSGGKSKAVEQVKNAFNKLQEKGIYKAMSEFDIFINYIEAYMTMKIRNHWHFAVWGQGTLVTVSSASTKGPSVFPLAPSSKSTSGGTAALGCLVKDYFPEPVTVSWNSGALTSGVHTFPAVLQSSGLYSLSSVVTVPSSSLGTQTYICNVNHKPSNTKVDKRVEPKSCDKTHTCPPCPAPELLGGPSVFLFPPKPKDTLMISRTPEVTCVVVDVSHEDPEVKFNWYVDGVEVHNAKTKPREEQYNSTYRVVSVLTVLHQDWLNGKEYKCKVSNKALPAPIEKTISKAKGQPREPQVYTLPPSREEMTKNQVSLTCLVKGFYPSDIAVEWESNGQPENNYKTTPPVLDSDGSFFLYSKLTVDKSRWQQGNVFSCSVMHEALHNHYTQKSLSLSPGK

SEQ ID NO: 3772 - protein, 15 aa, Artificial Sequence
  source: /note="Description of Artificial Sequence: Synthetic peptide"
RASQSVDYDGDSYMN

SEQ ID NO: 3773 - protein, 7 aa, Artificial Sequence
  source: /note="Description of Artificial Sequence: Synthetic peptide"
AASYLES

SEQ ID NO: 3774 - protein, 9 aa, Artificial Sequence
  source: /note="Description of Artificial Sequence: Synthetic peptide"
QQSHEDPYT

SEQ ID NO: 3775 - protein, 11 aa, Artificial Sequence
  source: /note="Description of Artificial Sequence: Synthetic peptide"
SQSVDYDGDSY

SEQ ID NO: 3776 - protein, 3 aa, Artificial Sequence
  source: /note="Description of Artificial Sequence: Synthetic peptide"
AAS

SEQ ID NO: 3777 - protein, 6 aa, Artificial Sequence
  source: /note="Description of Artificial Sequence: Synthetic peptide"
SHEDPY

SEQ ID NO: 3778 - protein, 111 aa, Artificial Sequence [sequence omitted]

SEQ ID NO: 3779 - DNA, 333 bp, Artificial Sequence; identical to SEQ ID NO: 3563
  source: /note="Description of Artificial Sequence: Synthetic polynucleotide"

SEQ ID NO: 3780 - protein, 218 aa, Artificial Sequence; identical to SEQ ID NO: 3564
  source: /note="Description of Artificial Sequence: Synthetic polypeptide"

SEQ ID NO: 3781 - protein, 6 aa, Artificial Sequence
  source: /note="Description of Artificial Sequence: Synthetic peptide"
SGYSWN

SEQ ID NO: 3782 - protein, 16 aa, Artificial Sequence
  source: /note="Description of Artificial Sequence: Synthetic peptide"
SITYDGSTNYNPSVKG

SEQ ID NO: 3783 - protein, 12 aa, Artificial Sequence
  source: /note="Description of Artificial Sequence: Synthetic peptide"
GSHYFGHWHFAV

SEQ ID NO: 3784 - protein, 8 aa, Artificial Sequence
  source: /note="Description of Artificial Sequence: Synthetic peptide"
GYSITSGY

SEQ ID NO: 3785 - protein, 5 aa, Artificial Sequence
  source: /note="Description of Artificial Sequence: Synthetic peptide"
TYDGS

SEQ ID NO: 3786 - protein, 12 aa, Artificial Sequence
  source: /note="Description of Artificial Sequence: Synthetic peptide"
GSHYFGHWHFAV

SEQ ID NO: 3787 - protein, 121 aa, Artificial Sequence [sequence omitted]

SEQ ID NO: 3788 - DNA, 363 bp, Artificial Sequence; identical to SEQ ID NO: 3536
  source: /note="Description of Artificial Sequence: Synthetic polynucleotide"

SEQ ID NO: 3789 - protein, 451 aa, Artificial Sequence
  source: /note="Description of Artificial Sequence: Synthetic polypeptide"
EVQLVESGGGLVQPGGSLRLSCAVSGYSITSGYSWNWIRQAPGKGLEWVASITYDGSTNYNPSVKGRITISRDDSKNTFYLQMNSLRAEDTAVYYCARGSHYFGHWHFAVWGQGTLVTVSSASTKGPSVFPLAPSSKSTSGGTAALGCLVKDYFPEPVTVSWNSGALTSGVHTFPAVLQSSGLYSLSSVVTVPSSSLGTQTYICNVNHKPSNTKVDKRVEPKSCDKTHTCPPCPAPELLGGPSVFLFPPKPKDTLMISRTPEVTCVVVDVSHEDPEVKFNWYVDGVEVHNAKTKPREEQYNSTYRVVSVLTVLHQDWLNGKEYKCKVSNKALPAPIEKTISKAKGQPREPQVYTLPPSREEMTKNQVSLTCLVKGFYPSDIAVEWESNGQPENNYKTTPPVLDSDGSFFLYSKLTVDKSRWQQGNVFSCSVMHEALHNHYTQKSLSLSPGK

SEQ ID NO: 3790 - protein, 181 aa, Artificial Sequence; identical to SEQ ID NO: 3646
  source: /note="Description of Artificial Sequence: Synthetic polypeptide"

SEQ ID NO: 3791 - protein, 7 aa, Artificial Sequence
  source: /note="Description of Artificial Sequence: Synthetic peptide"
AASYLES

SEQ ID NO: 3792 - protein, 9 aa, Artificial Sequence
  source: /note="Description of Artificial Sequence: Synthetic peptide"
QQSHEDPYT

SEQ ID NO: 3793 - protein, 177 aa, Artificial Sequence; identical to SEQ ID NO: 3649
  source: /note="Description of Artificial Sequence: Synthetic polypeptide"

SEQ ID NO: 3794 - protein, 3 aa, Artificial Sequence
  source: /note="Description of Artificial Sequence: Synthetic peptide"
AAS

SEQ ID NO: 3795 - protein, 6 aa, Artificial Sequence
  source: /note="Description of Artificial Sequence: Synthetic peptide"
SHEDPY

SEQ ID NO: 3796 - protein, 277 aa, Artificial Sequence; identical to SEQ ID NO: 3652
  source: /note="Description of Artificial Sequence: Synthetic polypeptide"

SEQ ID NO: 3797 - DNA, 831 bp, Artificial Sequence; identical to SEQ ID NO: 3653
  source: /note="Description of Artificial Sequence: Synthetic polynucleotide"

SEQ ID NO: 3798 - protein, 384 aa, Artificial Sequence; identical to SEQ ID NO: 3654
  source: /note="Description of Artificial Sequence: Synthetic polypeptide"

SEQ ID NO: 3799 - protein, 6 aa, Artificial Sequence
  source: /note="Description of Artificial Sequence: Synthetic peptide"
SGYSWN

SEQ ID NO: 3800 - protein, 16 aa, Artificial Sequence
  source: /note="Description of Artificial Sequence: Synthetic peptide"
SITYDGSTNYNPSVKG

SEQ ID NO: 3801 - protein, 12 aa, Artificial Sequence
  source: /note="Description of Artificial Sequence: Synthetic peptide"
GSHYFGHWHFAV

SEQ ID NO: 3802 - protein, 8 aa, Artificial Sequence
  source: /note="Description of Artificial Sequence: Synthetic peptide"
GYSITSGY

SEQ ID NO: 3803 - protein, 5 aa, Artificial Sequence
  source: /note="Description of Artificial Sequence: Synthetic peptide"
TYDGS

SEQ ID NO: 3804 - protein, 12 aa, Artificial Sequence
  source: /note="Description of Artificial Sequence: Synthetic peptide"
GSHYFGHWHFAV

SEQ ID NO: 3805 - protein, 121 aa, Artificial Sequence [sequence omitted]

SEQ ID NO: 3806 - DNA, 363 bp, Artificial Sequence; identical to SEQ ID NO: 3536
  source: /note="Description of Artificial Sequence: Synthetic polynucleotide"

SEQ ID NO: 3807 - protein, 451 aa, Artificial Sequence; identical to SEQ ID NO: 3789
  source: /note="Description of Artificial Sequence: Synthetic polypeptide"

SEQ ID NO: 3808 - protein, 15 aa, Artificial Sequence
  source: /note="Description of Artificial Sequence: Synthetic peptide"
RASQSVDYDGDSYMN

SEQ ID NO: 3809 - protein, 7 aa, Artificial Sequence
  source: /note="Description of Artificial Sequence: Synthetic peptide"
AASYLES

SEQ ID NO: 3810 - protein, 175 aa, Artificial Sequence; identical to SEQ ID NO: 3666
  source: /note="Description of Artificial Sequence: Synthetic polypeptide"

SEQ ID NO: 3811 - protein, 11 aa, Artificial Sequence
  source: /note="Description of Artificial Sequence: Synthetic peptide"
SQSVDYDGDSY

SEQ ID NO: 3812 - protein, 3 aa, Artificial Sequence
  source: /note="Description of Artificial Sequence: Synthetic peptide"
AAS

SEQ ID NO: 3813 - protein, 172 aa, Artificial Sequence; identical to SEQ ID NO: 3669
  source: /note="Description of Artificial Sequence: Synthetic polypeptide"

SEQ ID NO: 3814 - protein, 277 aa, Artificial Sequence; identical to SEQ ID NO: 3670
  source: /note="Description of Artificial Sequence: Synthetic polypeptide"

SEQ ID NO: 3815 - DNA, 831 bp, Artificial Sequence; identical to SEQ ID NO: 3671
  source: /note="Description of Artificial Sequence: Synthetic polynucleotide"

SEQ ID NO: 3816 - protein, 384 aa, Artificial Sequence; identical to SEQ ID NO: 3672
  source: /note="Description of Artificial Sequence: Synthetic polypeptide"

SEQ ID NO: 3817 - protein, 9 aa, Artificial Sequence
  source: /note="Description of Artificial Sequence: Synthetic peptide"
GFSLSTSGM

SEQ ID NO: 3818 - protein, 5 aa, Artificial Sequence
  source: /note="Description of Artificial Sequence: Synthetic peptide"
WWDDK

SEQ ID NO: 3819 - protein, 10 aa, Artificial Sequence
  source: /note="Description of Artificial Sequence: Synthetic peptide"
SMITNWYFDV

SEQ ID NO: 3820 - protein, 172 aa, Artificial Sequence
  source: /note="Description of Artificial Sequence: Synthetic polypeptide"
QLSSPGQGTQSENSCTHFPGNLPNMLRDLRDAFSRVKTFFQMKDQLDNLLLKESLLEDFKGYLGCQALSEMIQFYLEEVMPQAENQDPDIKAHVNSLGENLKTLRLRLRRCHRFLPCENGGGSGGKSKAVEQVKNAFNKLQEKGIYKAMSEFDIFINYIEAYMTMKIRNVGY

SEQ ID NO: 3821 - protein, 3 aa, Artificial Sequence
  source: /note="Description of Artificial Sequence: Synthetic peptide"
DTS

SEQ ID NO: 3822 - protein, 6 aa, Artificial Sequence
  source: /note="Description of Artificial Sequence: Synthetic peptide"
GSGYPF

SEQ ID NO: 3823 - protein, 7 aa, Artificial Sequence
  source: /note="Description of Artificial Sequence: Synthetic peptide"
TSGMSVG

SEQ ID NO: 3824 - protein, 16 aa, Artificial Sequence
  source: /note="Description of Artificial Sequence: Synthetic peptide"
DIWWDDKKDYNPSLKS

SEQ ID NO: 3825 - protein, 10 aa, Artificial Sequence
  source: /note="Description of Artificial Sequence: Synthetic peptide"
SMITNWYFDV

SEQ ID NO: 3826 - protein, 176 aa, Artificial Sequence
  source: /note="Description of Artificial Sequence: Synthetic polypeptide"
KAQLSSPGQGTQSENSCTHFPGNLPNMLRDLRDAFSRVKTFFQMKDQLDNLLLKESLLEDFKGYLGCQALSEMIQFYLEEVMPQAENQDPDIKAHVNSLGENLKTLRLRLRRCHRFLPCENGGGSGGKSKAVEQVKNAFNKLQEKGIYKAMSEFDIFINYIEAYMTMKIRNVGYMH

SEQ ID NO: 3827 - protein, 7 aa, Artificial Sequence
  source: /note="Description of Artificial Sequence: Synthetic peptide"
DTSKLAS

SEQ ID NO: 3828 - protein, 9 aa, Artificial Sequence
  source: /note="Description of Artificial Sequence: Synthetic peptide"
FQGSGYPFT

SEQ ID NO: 3829 - protein, 120 aa, Artificial Sequence; identical to SEQ ID NO: 55
  source: /note="Description of Artificial Sequence: Synthetic polypeptide"

SEQ ID NO: 3830 - protein, 272 aa, Artificial Sequence
  source: /note="Description of Artificial Sequence: Synthetic polypeptide"
DIQMTQSPSTLSASVGDRVTITCKAQLSSPGQGTQSENSCTHFPGNLPNMLRDLRDAFSRVKTFFQMKDQLDNLLLKESLLEDFKGYLGCQALSEMIQFYLEEVMPQAENQDPDIKAHVNSLGENLKTLRLRLRRCHRFLPCENGGGSGGKSKAVEQVKNAFNKLQEKGIYKAMSEFDIFINYIEAYMTMKIRNVGYMHWYQQKPGKAPKLLIYDTSKLASGVPSRFSGSGSGTAFTLTISSLQPDDFATYYCFQGSGYPFTFGGGTKLEIK

SEQ ID NO: 3831 - protein, 450 aa, Artificial Sequence
  source: /note="Description of Artificial Sequence: Synthetic polypeptide"
QVTLRESGPALVKPTQTLTLTCTFSGFSLSTSGMSVGWIRQPPGKALEWLADIWWDDKKDYNPSLKSRLTISKDTSANQVVLKVTNMDPADTATYYCARSMITNWYFDVWGAGTTVTVSSASTKGPSVFPLAPSSKSTSGGTAALGCLVKDYFPEPVTVSWNSGALTSGVHTFPAVLQSSGLYSLSSVVTVPSSSLGTQTYICNVNHKPSNTKVDKRVEPKSCDKTHTCPPCPAPELLGGPSVFLFPPKPKDTLMISRTPEVTCVVVDVSHEDPEVKFNWYVDGVEVHNAKTKPREEQYNSTYRVVSVLTVLHQDWLNGKEYKCKVSNKALPAPIEKTISKAKGQPREPQVYTLPPSREEMTKNQVSLTCLVKGFYPSDIAVEWESNGQPENNYKTTPPVLDSDGSFFLYSKLTVDKSRWQQGNVFSCSVMHEALHNHYTQKSLSLSPGK

SEQ ID NO: 3832 - protein, 379 aa, Artificial Sequence
  source: /note="Description of Artificial Sequence: Synthetic polypeptide"
DIQMTQSPSTLSASVGDRVTITCKAQLSSPGQGTQSENSCTHFPGNLPNMLRDLRDAFSRVKTFFQMKDQLDNLLLKESLLEDFKGYLGCQALSEMIQFYLEEVMPQAENQDPDIKAHVNSLGENLKTLRLRLRRCHRFLPCENGGGSGGKSKAVEQVKNAFNKLQEKGIYKAMSEFDIFINYIEAYMTMKIRNVGYMHWYQQKPGKAPKLLIYDTSKLASGVPSRFSGSGSGTAFTLTISSLQPDDFATYYCFQGSGYPFTFGGGTKLEIKRTVAAPSVFIFPPSDEQLKSGTASVVCLLNNFYPREAKVQWKVDNALQSGNSQESVTEQDSKDSTYSLSSTLTLSKADYEKHKVYACEVTHQGLSSPVTKSFNRGEC

SEQ ID NO: 3833 - protein, 9 aa, Artificial Sequence
  source: /note="Description of Artificial Sequence: Synthetic peptide"
GFSLSTSGM

SEQ ID NO: 3834 - protein, 5 aa, Artificial Sequence
  source: /note="Description of Artificial Sequence: Synthetic peptide"
WWDDK

SEQ ID NO: 3835 - protein, 10 aa, Artificial Sequence
  source: /note="Description of Artificial Sequence: Synthetic peptide"
SMITNWYFDV

SEQ ID NO: 3836 - protein, 6 aa, Artificial Sequence
  source: /note="Description of Artificial Sequence: Synthetic peptide"
QLSVGY

SEQ ID NO: 3837 - protein, 169 aa, Artificial Sequence
  source: /note="Description of Artificial Sequence: Synthetic polypeptide"
DTSPGQGTQSENSCTHFPGNLPNMLRDLRDAFSRVKTFFQMKDQLDNLLLKESLLEDFKGYLGCQALSEMIQFYLEEVMPQAENQDPDIKAHVNSLGENLKTLRLRLRRCHRFLPCENGGGSGGKSKAVEQVKNAFNKLQEKGIYKAMSEFDIFINYIEAYMTMKIRNS

SEQ ID NO: 3838 - protein, 6 aa, Artificial Sequence
  source: /note="Description of Artificial Sequence: Synthetic peptide"
GSGYPF

SEQ ID NO: 3839 - protein, 7 aa, Artificial Sequence
  source: /note="Description of Artificial Sequence: Synthetic peptide"
TSGMSVG

SEQ ID NO: 3840 - protein, 16 aa, Artificial Sequence
  source: /note="Description of Artificial Sequence: Synthetic peptide"
DIWWDDKKDYNPSLKS

SEQ ID NO: 3841 - protein, 10 aa, Artificial Sequence
  source: /note="Description of Artificial Sequence: Synthetic peptide"
SMITNWYFDV

SEQ ID NO: 3842 - protein, 10 aa, Artificial Sequence
  source: /note="Description of Artificial Sequence: Synthetic peptide"
KAQLSVGYMH

SEQ ID NO: 3843 - protein, 173 aa, Artificial Sequence
  source: /note="Description of Artificial Sequence: Synthetic polypeptide"
DTSPGQGTQSENSCTHFPGNLPNMLRDLRDAFSRVKTFFQMKDQLDNLLLKESLLEDFKGYLGCQALSEMIQFYLEEVMPQAENQDPDIKAHVNSLGENLKTLRLRLRRCHRFLPCENGGGSGGKSKAVEQVKNAFNKLQEKGIYKAMSEFDIFINYIEAYMTMKIRNSKLAS

SEQ ID NO: 3844 - protein, 9 aa, Artificial Sequence
  source: /note="Description of Artificial Sequence: Synthetic peptide"
FQGSGYPFT

SEQ ID NO: 3845 - protein, 120 aa, Artificial Sequence; identical to SEQ ID NO: 55
  source: /note="Description of Artificial Sequence: Synthetic polypeptide"

SEQ ID NO: 3846 - protein, 272 aa, Artificial Sequence
  source: /note="Description of Artificial Sequence: Synthetic polypeptide"
DIQMTQSPSTLSASVGDRVTITCKAQLSVGYMHWYQQKPGKAPKLLIYDTSPGQGTQSENSCTHFPGNLPNMLRDLRDAFSRVKTFFQMKDQLDNLLLKESLLEDFKGYLGCQALSEMIQFYLEEVMPQAENQDPDIKAHVNSLGENLKTLRLRLRRCHRFLPCENGGGSGGKSKAVEQVKNAFNKLQEKGIYKAMSEFDIFINYIEAYMTMKIRNSKLASGVPSRFSGSGSGTAFTLTISSLQPDDFATYYCFQGSGYPFTFGGGTKLEIK

SEQ ID NO: 3847 - protein, 450 aa, Artificial Sequence; identical to SEQ ID NO: 3831
  source: /note="Description of Artificial Sequence: Synthetic polypeptide"

SEQ ID NO: 3848 - protein, 379 aa, Artificial Sequence
  source: /note="Description of Artificial Sequence: Synthetic polypeptide"
DIQMTQSPSTLSASVGDRVTITCKAQLSVGYMHWYQQKPGKAPKLLIYDTSPGQGTQSENSCTHFPGNLPNMLRDLRDAFSRVKTFFQMKDQLDNLLLKESLLEDFKGYLGCQALSEMIQFYLEEVMPQAENQDPDIKAHVNSLGENLKTLRLRLRRCHRFLPCENGGGSGGKSKAVEQVKNAFNKLQEKGIYKAMSEFDIFINYIEAYMTMKIRNSKLASGVPSRFSGSGSGTAFTLTISSLQPDDFATYYCFQGSGYPFTFGGGTKLEIKRTVAAPSVFIFPPSDEQLKSGTASVVCLLNNFYPREAKVQWKVDNALQSGNSQESVTEQDSKDSTYSLSSTLTLSKADYEKHKVYACEVTHQGLSSPVTKSFNRGEC

SEQ ID NO: 3849 - protein, 9 aa, Artificial Sequence
  source: /note="Description of Artificial Sequence: Synthetic peptide"
GFSLSTSGM

SEQ ID NO: 3850 - protein, 5 aa, Artificial Sequence
  source: /note="Description of Artificial Sequence: Synthetic peptide"
WWDDK

SEQ ID NO: 3851 - protein, 10 aa, Artificial Sequence
  source: /note="Description of Artificial Sequence: Synthetic peptide"
SMITNWYFDV

SEQ ID NO: 3852 - protein, 6 aa, Artificial Sequence
  source: /note="Description of Artificial Sequence: Synthetic peptide"
QLSVGY

SEQ ID NO: 3853 - protein, 3 aa, Artificial Sequence
  source: /note="Description of Artificial Sequence: Synthetic peptide"
DTS

SEQ ID NO: 3854 - protein, 172 aa, Artificial Sequence
  source: /note="Description of Artificial Sequence: Synthetic polypeptide"
GSGSPGQGTQSENSCTHFPGNLPNMLRDLRDAFSRVKTFFQMKDQLDNLLLKESLLEDFKGYLGCQALSEMIQFYLEEVMPQAENQDPDIKAHVNSLGENLKTLRLRLRRCHRFLPCENGGGSGGKSKAVEQVKNAFNKLQEKGIYKAMSEFDIFINYIEAYMTMKIRNYPF

SEQ ID NO: 3855 - protein, 7 aa, Artificial Sequence
  source: /note="Description of Artificial Sequence: Synthetic peptide"
TSGMSVG

SEQ ID NO: 3856 - protein, 16 aa, Artificial Sequence
  source: /note="Description of Artificial Sequence: Synthetic peptide"
DIWWDDKKDYNPSLKS

SEQ ID NO: 3857 - protein, 10 aa, Artificial Sequence
  source: /note="Description of Artificial Sequence: Synthetic peptide"
SMITNWYFDV

SEQ ID NO: 3858 - protein, 10 aa, Artificial Sequence
  source: /note="Description of Artificial Sequence: Synthetic peptide"
KAQLSVGYMH

SEQ ID NO: 3859 - protein, 7 aa, Artificial Sequence
  source: /note="Description of Artificial Sequence: Synthetic peptide"
DTSKLAS

SEQ ID NO: 3860 - protein, 175 aa, Artificial Sequence
  source: /note="Description of Artificial Sequence: Synthetic polypeptide"
FQGSGSPGQGTQSENSCTHFPGNLPNMLRDLRDAFSRVKTFFQMKDQLDNLLLKESLLEDFKGYLGCQALSEMIQFYLEEVMPQAENQDPDIKAHVNSLGENLKTLRLRLRRCHRFLPCENGGGSGGKSKAVEQVKNAFNKLQEKGIYKAMSEFDIFINYIEAYMTMKIRNYPFT

SEQ ID NO: 3861 - protein, 120 aa, Artificial Sequence; identical to SEQ ID NO: 55
  source: /note="Description of Artificial Sequence: Synthetic polypeptide"

SEQ ID NO: 3862 - protein, 272 aa, Artificial Sequence
  source: /note="Description of Artificial Sequence: Synthetic polypeptide"
DIQMTQSPSTLSASVGDRVTITCKAQLSVGYMHWYQQKPGKAPKLLIYDTSKLASGVPSRFSGSGSGTAFTLTISSLQPDDFATYYCFQGSGSPGQGTQSENSCTHFPGNLPNMLRDLRDAFSRVKTFFQMKDQLDNLLLKESLLEDFKGYLGCQALSEMIQFYLEEVMPQAENQDPDIKAHVNSLGENLKTLRLRLRRCHRFLPCENGGGSGGKSKAVEQVKNAFNKLQEKGIYKAMSEFDIFINYIEAYMTMKIRNYPFTFGGGTKLEIK

SEQ ID NO: 3863 - protein, 450 aa, Artificial Sequence; identical to SEQ ID NO: 3831
  source: /note="Description of Artificial Sequence: Synthetic polypeptide"

SEQ ID NO: 3864 - protein, 379 aa, Artificial Sequence
  source: /note="Description of Artificial Sequence: Synthetic polypeptide"
DIQMTQSPSTLSASVGDRVTITCKAQLSVGYMHWYQQKPGKAPKLLIYDTSKLASGVPSRFSGSGSGTAFTLTISSLQPDDFATYYCFQGSGSPGQGTQSENSCTHFPGNLPNMLRDLRDAFSRVKTFFQMKDQLDNLLLKESLLEDFKGYLGCQALSEMIQFYLEEVMPQAENQDPDIKAHVNSLGENLKTLRLRLRRCHRFLPCENGGGSGGKSKAVEQVKNAFNKLQEKGIYKAMSEFDIFINYIEAYMTMKIRNYPFTFGGGTKLEIKRTVAAPSVFIFPPSDEQLKSGTASVVCLLNNFYPREAKVQWKVDNALQSGNSQESVTEQDSKDSTYSLSSTLTLSKADYEKHKVYACEVTHQGLSSPVTKSFNRGEC

SEQ ID NO: 3865 - protein, 175 aa, Artificial Sequence
  source: /note="Description of Artificial Sequence: Synthetic polypeptide"
GFSLSPGQGTQSENSCTHFPGNLPNMLRDLRDAFSRVKTFFQMKDQLDNLLLKESLLEDFKGYLGCQALSEMIQFYLEEVMPQAENQDPDIKAHVNSLGENLKTLRLRLRRCHRFLPCENGGGSGGKSKAVEQVKNAFNKLQEKGIYKAMSEFDIFINYIEAYMTMKIRNSTSGM

SEQ ID NO: 3866 - protein, 5 aa, Artificial Sequence
  source: /note="Description of Artificial Sequence: Synthetic peptide"
WWDDK

SEQ ID NO: 3867 - protein, 10 aa, Artificial Sequence
  source: /note="Description of Artificial Sequence: Synthetic peptide"
SMITNWYFDV

SEQ ID NO: 3868 - protein, 6 aa, Artificial Sequence
  source: /note="Description of Artificial Sequence: Synthetic peptide"
QLSVGY

SEQ ID NO: 3869 - protein, 3 aa, Artificial Sequence
  source: /note="Description of Artificial Sequence: Synthetic peptide"
DTS

SEQ ID NO: 3870 - protein, 6 aa, Artificial Sequence
  source: /note="Description of Artificial Sequence: Synthetic peptide"
GSGYPF

SEQ ID NO: 3871 - protein, 174 aa, Artificial Sequence
  source: /note="Description of Artificial Sequence: Synthetic polypeptide"
SPGQGTQSENSCTHFPGNLPNMLRDLRDAFSRVKTFFQMKDQLDNLLLKESLLEDFKGYLGCQALSEMIQFYLEEVMPQAENQDPDIKAHVNSLGENLKTLRLRLRRCHRFLPCENGGGSGGKSKAVEQVKNAFNKLQEKGIYKAMSEFDIFINYIEAYMTMKIRNSTSGMSVG

SEQ ID NO: 3872 - protein, 16 aa, Artificial Sequence
  source: /note="Description of Artificial Sequence: Synthetic peptide"
DIWWDDKKDYNPSLKS

SEQ ID NO: 3873 - protein, 10 aa, Artificial Sequence
  source: /note="Description of Artificial Sequence: Synthetic peptide"
SMITNWYFDV

SEQ ID NO: 3874 - protein, 10 aa, Artificial Sequence
  source: /note="Description of Artificial Sequence: Synthetic peptide"
KAQLSVGYMH

SEQ ID NO: 3875 - protein, 7 aa, Artificial Sequence
  source: /note="Description of Artificial Sequence: Synthetic peptide"
DTSKLAS

SEQ ID NO: 3876 - protein, 9 aa, Artificial Sequence
  source: /note="Description of Artificial Sequence: Synthetic peptide"
FQGSGYPFT

SEQ ID NO: 3877 - protein, 286 aa, Artificial Sequence
  source: /note="Description of Artificial Sequence: Synthetic polypeptide"
QVTLRESGPALVKPTQTLTLTCTFSGFSLSPGQGTQSENSCTHFPGNLPNMLRDLRDAFSRVKTFFQMKDQLDNLLLKESLLEDFKGYLGCQALSEMIQFYLEEVMPQAENQDPDIKAHVNSLGENLKTLRLRLRRCHRFLPCENGGGSGGKSKAVEQVKNAFNKLQEKGIYKAMSEFDIFINYIEAYMTMKIRNSTSGMSVGWIRQPPGKALEWLADIWWDDKKDYNPSLKSRLTISKDTSANQVVLKVTNMDPADTATYYCARSMITNWYFDVWGAGTTVTVSS

SEQ ID NO: 3878 - protein, 106 aa, Artificial Sequence
  source: /note="Description of Artificial Sequence: Synthetic polypeptide"
DIQMTQSPSTLSASVGDRVTITCKAQLSVGYMHWYQQKPGKAPKLLIYDTSKLASGVPSRFSGSGSGTAFTLTISSLQPDDFATYYCFQGSGYPFTFGGGTKLEIK

SEQ ID NO: 3879 - protein, 616 aa, Artificial Sequence
  source: /note="Description of Artificial Sequence: Synthetic polypeptide"
QVTLRESGPALVKPTQTLTLTCTFSGFSLSPGQGTQSENSCTHFPGNLPNMLRDLRDAFSRVKTFFQMKDQLDNLLLKESLLEDFKGYLGCQALSEMIQFYLEEVMPQAENQDPDIKAHVNSLGENLKTLRLRLRRCHRFLPCENGGGSGGKSKAVEQVKNAFNKLQEKGIYKAMSEFDIFINYIEAYMTMKIRNSTSGMSVGWIRQPPGKALEWLADIWWDDKKDYNPSLKSRLTISKDTSANQVVLKVTNMDPADTATYYCARSMITNWYFDVWGAGTTVTVSSASTKGPSVFPLAPSSKSTSGGTAALGCLVKDYFPEPVTVSWNSGALTSGVHTFPAVLQSSGLYSLSSVVTVPSSSLGTQTYICNVNHKPSNTKVDKRVEPKSCDKTHTCPPCPAPELLGGPSVFLFPPKPKDTLMISRTPEVTCVVVDVSHEDPEVKFNWYVDGVEVHNAKTKPREEQYNSTYRVVSVLTVLHQDWLNGKEYKCKVSNKALPAPIEKTISKAKGQPREPQVYTLPPSREEMTKNQVSLTCLVKGFYPSDIAVEWESNGQPENNYKTTPPVLDSDGSFFLYSKLTVDKSRWQQGNVFSCSVMHEALHNHYTQKSLSLSPGK

SEQ ID NO: 3880 - protein, 213 aa, Artificial Sequence
  source: /note="Description of Artificial Sequence: Synthetic polypeptide"
DIQMTQSPSTLSASVGDRVTITCKAQLSVGYMHWYQQKPGKAPKLLIYDTSKLASGVPSRFSGSGSGTAFTLTISSLQPDDFATYYCFQGSGYPFTFGGGTKLEIKRTVAAPSVFIFPPSDEQLKSGTASVVCLLNNFYPREAKVQWKVDNALQSGNSQESVTEQDSKDSTYSLSSTLTLSKADYEKHKVYACEVTHQGLSSPVTKSFNRGEC

SEQ ID NO: 3881 - protein, 9 aa, Artificial Sequence
  source: /note="Description of Artificial Sequence: Synthetic peptide"
GFSLSTSGM

SEQ ID NO: 3882 - protein, 171 aa, Artificial Sequence
  source: /note="Description of Artificial Sequence: Synthetic polypeptide"
WWDSPGQGTQSENSCTHFPGNLPNMLRDLRDAFSRVKTFFQMKDQLDNLLLKESLLEDFKGYLGCQALSEMIQFYLEEVMPQAENQDPDIKAHVNSLGENLKTLRLRLRRCHRFLPCENGGGSGGKSKAVEQVKNAFNKLQEKGIYKAMSEFDIFINYIEAYMTMKIRNDK

SEQ ID NO: 3883 - protein, 10 aa, Artificial Sequence
  source: /note="Description of Artificial Sequence: Synthetic peptide"
SMITNWYFDV

SEQ ID NO: 3884 - protein, 6 aa, Artificial Sequence
  source: /note="Description of Artificial Sequence: Synthetic peptide"
QLSVGY

SEQ ID NO: 3885 - protein, 3 aa, Artificial Sequence
  source: /note="Description of Artificial Sequence: Synthetic peptide"
DTS

SEQ ID NO: 3886 - protein, 6 aa, Artificial Sequence
  source: /note="Description of Artificial Sequence: Synthetic peptide"
GSGYPF

SEQ ID NO: 3887 - protein, 7 aa, Artificial Sequence
  source: /note="Description of Artificial Sequence: Synthetic peptide"
TSGMSVG

SEQ ID NO: 3888 - protein, 182 aa, Artificial Sequence
  source: /note="Description of Artificial Sequence: Synthetic polypeptide"
DIWWDSPGQGTQSENSCTHFPGNLPNMLRDLRDAFSRVKTFFQMKDQLDNLLLKESLLEDFKGYLGCQALSEMIQFYLEEVMPQAENQDPDIKAHVNSLGENLKTLRLRLRRCHRFLPCENGGGSGGKSKAVEQVKNAFNKLQEKGIYKAMSEFDIFINYIEAYMTMKIRNDKKDYNPSLKS

SEQ ID NO: 3889 - protein, 10 aa, Artificial Sequence
  source: /note="Description of Artificial Sequence: Synthetic peptide"
SMITNWYFDV

SEQ ID NO: 3890 - protein, 10 aa, Artificial Sequence
  source: /note="Description of Artificial Sequence: Synthetic peptide"
KAQLSVGYMH

SEQ ID NO: 3891 - protein, 7 aa, Artificial Sequence
  source: /note="Description of Artificial Sequence: Synthetic peptide"
DTSKLAS

SEQ ID NO: 3892 - protein, 9 aa, Artificial Sequence
  source: /note="Description of Artificial Sequence: Synthetic peptide"
FQGSGYPFT

SEQ ID NO: 3893 - protein, 286 aa, Artificial Sequence
  source: /note="Description of Artificial Sequence: Synthetic polypeptide"
QVTLRESGPALVKPTQTLTLTCTFSGFSLSTSGMSVGWIRQPPGKALEWLADIWWDSPGQGTQSENSCTHFPGNLPNMLRDLRDAFSRVKTFFQMKDQLDNLLLKESLLEDFKGYLGCQALSEMIQFYLEEVMPQAENQDPDIKAHVNSLGENLKTLRLRLRRCHRFLPCENGGGSGGKSKAVEQVKNAFNKLQEKGIYKAMSEFDIFINYIEAYMTMKIRNDKKDYNPSLKSRLTISKDTSANQVVLKVTNMDPADTATYYCARSMITNWYFDVWGAGTTVTVSS

SEQ ID NO: 3894 - protein, 106 aa, Artificial Sequence; identical to SEQ ID NO: 3878
  source: /note="Description of Artificial Sequence: Synthetic polypeptide"

SEQ ID NO: 3895 - protein, 616 aa, Artificial Sequence
  source: /note="Description of Artificial Sequence: Synthetic polypeptide"
QVTLRESGPALVKPTQTLTLTCTFSGFSLSTSGMSVGWIRQPPGKALEWLADIWWDSPGQGTQSENSCTHFPGNLPNMLRDLRDAFSRVKTFFQMKDQLDNLLLKESLLEDFKGYLGCQALSEMIQFYLEEVMPQAENQDPDIKAHVNSLGENLKTLRLRLRRCHRFLPCENGGGSGGKSKAVEQVKNAFNKLQEKGIYKAMSEFDIFINYIEAYMTMKIRNDKKDYNPSLKSRLTISKDTSANQVVLKVTNMDPADTATYYCARSMITNWYFDVWGAGTTVTVSSASTKGPSVFPLAPSSKSTSGGTAALGCLVKDYFPEPVTVSWNSGALTSGVHTFPAVLQSSGLYSLSSVVTVPSSSLGTQTYICNVNHKPSNTKVDKRVEPKSCDKTHTCPPCPAPELLGGPSVFLFPPKPKDTLMISRTPEVTCVVVDVSHEDPEVKFNWYVDGVEVHNAKTKPREEQYNSTYRVVSVLTVLHQDWLNGKEYKCKVSNKALPAPIEKTISKAKGQPREPQVYTLPPSREEMTKNQVSLTCLVKGFYPSDIAVEWESNGQPENNYKTTPPVLDSDGSFFLYSKLTVDKSRWQQGNVFSCSVMHEALHNHYTQKSLSLSPGK

SEQ ID NO: 3896 - protein, 213 aa, Artificial Sequence; identical to SEQ ID NO: 3880
  source: /note="Description of Artificial Sequence: Synthetic polypeptide"

SEQ ID NO: 3897 - protein, 9 aa, Artificial Sequence
  source: /note="Description of Artificial Sequence: Synthetic peptide"
GFSLSTSGM

SEQ ID NO: 3898 - protein, 5 aa, Artificial Sequence
  source: /note="Description of Artificial Sequence: Synthetic peptide"
WWDDK

SEQ ID NO: 3899 - protein, 176 aa, Artificial Sequence
  source: /note="Description of Artificial Sequence: Synthetic polypeptide"
SMITSPGQGTQSENSCTHFPGNLPNMLRDLRDAFSRVKTFFQMKDQLDNLLLKESLLEDFKGYLGCQALSEMIQFYLEEVMPQAENQDPDIKAHVNSLGENLKTLRLRLRRCHRFLPCENGGGSGGKSKAVEQVKNAFNKLQEKGIYKAMSEFDIFINYIEAYMTMKIRNNWYFDV

SEQ ID NO: 3900 - protein, 6 aa, Artificial Sequence
  source: /note="Description of Artificial Sequence: Synthetic peptide"
QLSVGY

SEQ ID NO: 3901 - protein, 3 aa, Artificial Sequence
  source: /note="Description of Artificial Sequence: Synthetic peptide"
DTS

SEQ ID NO: 3902 - protein, 6 aa, Artificial Sequence
  source: /note="Description of Artificial Sequence: Synthetic peptide"
GSGYPF

SEQ ID NO: 3903 - protein, 7 aa, Artificial Sequence
  source: /note="Description of Artificial Sequence: Synthetic peptide"
TSGMSVG

SEQ ID NO: 3904 - protein, 16 aa, Artificial Sequence
  source: /note="Description of Artificial Sequence: Synthetic peptide"
DIWWDDKKDYNPSLKS

SEQ ID NO: 3905 - protein, 176 aa, Artificial Sequence; identical to SEQ ID NO: 3899
  source: /note="Description of Artificial Sequence: Synthetic polypeptide"

SEQ ID NO: 3906 - protein, 10 aa, Artificial Sequence
  source: /note="Description of Artificial Sequence: Synthetic peptide"
KAQLSVGYMH

SEQ ID NO: 3907 - protein, 7 aa, Artificial Sequence
  source: /note="Description of Artificial Sequence: Synthetic peptide"
DTSKLAS

SEQ ID NO: 3908 - protein, 9 aa, Artificial Sequence
  source: /note="Description of Artificial Sequence: Synthetic peptide"
FQGSGYPFT

SEQ ID NO: 3909 - protein, 286 aa, Artificial Sequence
  source: /note="Description of Artificial Sequence: Synthetic polypeptide"
QVTLRESGPALVKPTQTLTLTCTFSGFSLSTSGMSVGWIRQPPGKALEWLADIWWDDKKDYNPSLKSRLTISKDTSANQVVLKVTNMDPADTATYYCARSMITSPGQGTQSENSCTHFPGNLPNMLRDLRDAFSRVKTFFQMKDQLDNLLLKESLLEDFKGYLGCQALSEMIQFYLEEVMPQAENQDPDIKAHVNSLGENLKTLRLRLRRCHRFLPCENGGGSGGKSKAVEQVKNAFNKLQEKGIYKAMSEFDIFINYIEAYMTMKIRNNWYFDVWGAGTTVTVSS

SEQ ID NO: 3910 - protein, 106 aa, Artificial Sequence; identical to SEQ ID NO: 3878
  source: /note="Description of Artificial Sequence: Synthetic polypeptide"

SEQ ID NO: 3911 - protein, 616 aa, Artificial Sequence
  source: /note="Description of Artificial Sequence: Synthetic polypeptide"
QVTLRESGPALVKPTQTLTLTCTFSGFSLSTSGMSVGWIRQPPGKALEWLADIWWDDKKDYNPSLKSRLTISKDTSANQVVLKVTNMDPADTATYYCARSMITSPGQGTQSENSCTHFPGNLPNMLRDLRDAFSRVKTFFQMKDQLDNLLLKESLLEDFKGYLGCQALSEMIQFYLEEVMPQAENQDPDIKAHVNSLGENLKTLRLRLRRCHRFLPCENGGGSGGKSKAVEQVKNAFNKLQEKGIYKAMSEFDIFINYIEAYMTMKIRNNWYFDVWGAGTTVTVSSASTKGPSVFPLAPSSKSTSGGTAALGCLVKDYFPEPVTVSWNSGALTSGVHTFPAVLQSSGLYSLSSVVTVPSSSLGTQTYICNVNHKPSNTKVDKRVEPKSCDKTHTCPPCPAPELLGGPSVFLFPPKPKDTLMISRTPEVTCVVVDVSHEDPEVKFNWYVDGVEVHNAKTKPREEQYNSTYRVVSVLTVLHQDWLNGKEYKCKVSNKALPAPIEKTISKAKGQPREPQVYTLPPSREEMTKNQVSLTCLVKGFYPSDIAVEWESNGQPENNYKTTPPVLDSDGSFFLYSKLTVDKSRWQQGNVFSCSVMHEALHNHYTQKSLSLSPGK

SEQ ID NO: 3912 - protein, 213 aa, Artificial Sequence; identical to SEQ ID NO: 3880
  source: /note="Description of Artificial Sequence: Synthetic polypeptide"

SEQ ID NO: 3913 - protein, 9 aa, Artificial Sequence
  source: /note="Description of Artificial Sequence: Synthetic peptide"
GFSLSTSGM

SEQ ID NO: 3914 - protein, 5 aa, Artificial Sequence
  source: /note="Description of Artificial Sequence: Synthetic peptide"
WWDDK

SEQ ID NO: 3915 - protein, 10 aa, Artificial Sequence
  source: /note="Description of Artificial Sequence: Synthetic peptide"
SMITNWYFDV

SEQ ID NO: 3916 - protein, 172 aa, Artificial Sequence; identical to SEQ ID NO: 3820
  source: /note="Description of Artificial Sequence: Synthetic polypeptide"

SEQ ID NO: 3917 - protein, 3 aa, Artificial Sequence
  source: /note="Description of Artificial Sequence: Synthetic peptide"
DTS

SEQ ID NO: 3918 - protein, 6 aa, Artificial Sequence
  source: /note="Description of Artificial Sequence: Synthetic peptide"
GSGYPF

SEQ ID NO: 3919 - protein, 7 aa, Artificial Sequence
  source: /note="Description of Artificial Sequence: Synthetic peptide"
TSGMSVG

SEQ ID NO: 3920 - protein, 16 aa, Artificial Sequence
  source: /note="Description of Artificial Sequence: Synthetic peptide"
DIWWDDKKDYNPSLKS

SEQ ID NO: 3921 - protein, 10 aa, Artificial Sequence
  source: /note="Description of Artificial Sequence: Synthetic peptide"
SMITNWYFDV

SEQ ID NO: 3922 - protein, 176 aa, Artificial Sequence; identical to SEQ ID NO: 3826
  source: /note="Description of Artificial Sequence: Synthetic polypeptide"

SEQ ID NO: 3923 - protein, 7 aa, Artificial Sequence
  source: /note="Description of Artificial Sequence: Synthetic peptide"
DTSKLAS

SEQ ID NO: 3924 - protein, 9 aa, Artificial Sequence
  source: /note="Description of Artificial Sequence: Synthetic peptide"
FQGSGYPFT

SEQ ID NO: 3925 - protein, 120 aa, Artificial Sequence; identical to SEQ ID NO: 55
  source: /note="Description of Artificial Sequence: Synthetic polypeptide"

SEQ ID NO: 3926 - protein, 272 aa, Artificial Sequence; identical to SEQ ID NO: 3830
  source: /note="Description of Artificial Sequence: Synthetic polypeptide"

SEQ ID NO: 3927 - protein, 450 aa, Artificial Sequence; identical to SEQ ID NO: 56
  source: /note="Description of Artificial Sequence: Synthetic polypeptide"

SEQ ID NO: 3928 - protein, 379 aa, Artificial Sequence; identical to SEQ ID NO: 3832
  source: /note="Description of Artificial Sequence: Synthetic polypeptide"

SEQ ID NO: 3929 - protein, 166 aa, Artificial Sequence
  source: /note="Description of Artificial Sequence: Synthetic polypeptide"
SPGQGTQSENSCTHFPGNLPNMLRDLRDAFSRVKTFFQMKDQLDNLLLKESLLEDFKGYLGCQALSEMIQFYLEEVMPQAENQDPDIKAHVNSLGENLKTLRLRLRRCHRFLPCENGGGSGGKSKAVEQVKNAFNKLQEKGIYKAMSEFDIFINYIEAYMTMKIRN

SEQ ID NO: 3930 - protein, 9 aa, Artificial Sequence
  source: /note="Description of Artificial Sequence: Synthetic peptide"
GFSLSTSGM

SEQ ID NO: 3931 - protein, 5 aa, Artificial Sequence
  source: /note="Description of Artificial Sequence: Synthetic peptide"
WWDDK

SEQ ID NO: 3932 - protein, 10 aa, Artificial Sequence
  source: /note="Description of Artificial Sequence: Synthetic peptide"
SMITNWYFDV

SEQ ID NO: 3933 - protein, 172 aa, Artificial Sequence; identical to SEQ ID NO: 3820
  source: /note="Description of Artificial Sequence: Synthetic polypeptide"

SEQ ID NO: 3934 - protein, 3 aa, Artificial Sequence
  source: /note="Description of Artificial Sequence: Synthetic peptide"
DTS

SEQ ID NO: 3935 - protein, 6 aa, Artificial Sequence
  source: /note="Description of Artificial Sequence: Synthetic peptide"
GSGYPF

SEQ ID NO: 3936 - protein, 7 aa, Artificial Sequence
  source: /note="Description of Artificial Sequence: Synthetic peptide"
TSGMSVG

SEQ ID NO: 3937 - protein, 16 aa, Artificial Sequence
  source: /note="Description of Artificial Sequence: Synthetic peptide"
DIWWDDKKDYNPSLKS

SEQ ID NO: 3938 - protein, 10 aa, Artificial Sequence
  source: /note="Description of Artificial Sequence: Synthetic peptide"
SMITNWYFDV

SEQ ID NO: 3939 - protein, 176 aa, Artificial Sequence; identical to SEQ ID NO: 3826
  source: /note="Description of Artificial Sequence: Synthetic polypeptide"

SEQ ID NO: 3940 - protein, 7 aa, Artificial Sequence
  source: /note="Description of Artificial Sequence: Synthetic peptide"
DTSKLAS

SEQ ID NO: 3941 - protein, 9 aa, Artificial Sequence
  source: /note="Description of Artificial Sequence: Synthetic peptide"
FQGSGYPFT

SEQ ID NO: 3942 - protein, 120 aa, Artificial Sequence; identical to SEQ ID NO: 55
  source: /note="Description of Artificial Sequence: Synthetic polypeptide"

SEQ ID NO: 3943 - protein, 272 aa, Artificial Sequence; identical to SEQ ID NO: 3830
  source: /note="Description of Artificial Sequence: Synthetic polypeptide"

SEQ ID NO: 3944 - protein, 450 aa, Artificial Sequence
  source: /note="Description of Artificial Sequence: Synthetic polypeptide"
QVTLRESGPALVKPTQTLTLTCTFSGFSLSTSGMSVGWIRQPPGKALEWLADIWWDDKKDYNPSLKSRLTISKDTSANQVVLKVTNMDPADTATYYCARSMITNWYFDVWGAGTTVTVSSASTKGPSVFPLAPSSKSTSGGTAALGCLVKDYFPEPVTVSWNSGALTSGVHTFPAVLQSSGLYSLSSVVTVPSSSLGTQTYICNVNHKPSNTKVDKRVEPKSCDKTHTCPPCPAPEAAGGPSVFLFPPKPKDTLMISRTPEVTCVVVDVSHEDPEVKFNWYVDGVEVHNAKTKPREEQYNSTYRVVSVLTVLHQDWLNGKEYKCKVSNKALPAPIEKTISKAKGQPREPQVYTLPPSREEMTKNQVSLTCLVKGFYPSDIAVEWESNGQPENNYKTTPPVLDSDGSFFLYSKLTVDKSRWQQGNVFSCSVMHEALHNHYTQKSLSLSPGK

SEQ ID NO: 3945 - protein, 379 aa, Artificial Sequence; identical to SEQ ID NO: 3832
  source: /note="Description of Artificial Sequence: Synthetic polypeptide"

SEQ ID NO: 3946 - protein, 9 aa, Artificial Sequence
  source: /note="Description of Artificial Sequence: Synthetic peptide"
GFSLSTSGM

SEQ ID NO: 3947 - protein, 5 aa, Artificial Sequence
  source: /note="Description of Artificial Sequence: Synthetic peptide"
WWDDK

SEQ ID NO: 3948 - protein, 10 aa, Artificial Sequence
  source: /note="Description of Artificial Sequence: Synthetic peptide"
SMITNWYFDV

SEQ ID NO: 3949 - protein, 172 aa, Artificial Sequence; identical to SEQ ID NO: 3820
  source: /note="Description of Artificial Sequence: Synthetic polypeptide"

SEQ ID NO: 3950 - protein, 3 aa, Artificial Sequence
  source: /note="Description of Artificial Sequence: Synthetic peptide"
DTS

SEQ ID NO: 3951 - protein, 6 aa, Artificial Sequence
  source: /note="Description of Artificial Sequence: Synthetic peptide"
GSGYPF

SEQ ID NO: 3952 - protein, 7 aa, Artificial Sequence
  source: /note="Description of Artificial Sequence: Synthetic peptide"
TSGMSVG

SEQ ID NO: 3953 - protein, 16 aa, Artificial Sequence
  source: /note="Description of Artificial Sequence: Synthetic peptide"
DIWWDDKKDYNPSLKS

SEQ ID NO: 3954 - protein, 10 aa, Artificial Sequence
  source: /note="Description of Artificial Sequence: Synthetic peptide"
SMITNWYFDV

SEQ ID NO: 3955 - protein, 176 aa, Artificial Sequence; identical to SEQ ID NO: 3826
  source: /note="Description of Artificial Sequence: Synthetic polypeptide"

SEQ ID NO: 3956 - protein, 7 aa, Artificial Sequence
  source: /note="Description of Artificial Sequence: Synthetic peptide"
DTSKLAS

SEQ ID NO: 3957 - protein, 9 aa, Artificial Sequence
  source: /note="Description of Artificial Sequence: Synthetic peptide"
FQGSGYPFT

SEQ ID NO: 3958 - protein, 120 aa, Artificial Sequence; identical to SEQ ID NO: 55
  source: /note="Description of Artificial Sequence: Synthetic polypeptide"

SEQ ID NO: 3959 - protein, 272 aa, Artificial Sequence; identical to SEQ ID NO: 3830
  source: /note="Description of Artificial Sequence: Synthetic polypeptide"

SEQ ID NO: 3960 - protein, 450 aa, Artificial Sequence
  source: /note="Description of Artificial Sequence: Synthetic polypeptide"
QVTLRESGPALVKPTQTLTLTCTFSGFSLSTSGMSVGWIRQPPGKALEWLADIWWDDKKDYNPSLKSRLTISKDTSANQVVLKVTNMDPADTATYYCARSMITNWYFDVWGAGTTVTVSSASTKGPSVFPLAPSSKSTSGGTAALGCLVKDYFPEPVTVSWNSGALTSGVHTFPAVLQSSGLYSLSSVVTVPSSSLGTQTYICNVNHKPSNTKVDKRVEPKSCDKTHTCPPCPAPELLGGPSVFLFPPKPKDTLMISRTPEVTCVVVDVSHEDPEVKFNWYVDGVEVHNAKTKPREEQYASTYRVVSVLTVLHQDWLNGKEYKCKVSNKALPAPIEKTISKAKGQPREPQVYTLPPSREEMTKNQVSLTCLVKGFYPSDIAVEWVSNGQPENNYKTTPPVLDSDGSFFLYSKLTVDKSRWQQGNVFSCSVIHEALHNHYTQKSLSLSPGK

SEQ ID NO: 3961 - protein, 379 aa, Artificial Sequence; identical to SEQ ID NO: 3832
  source: /note="Description of Artificial Sequence: Synthetic polypeptide"

SEQ ID NO: 3962 - DNA, 360 bp, Artificial Sequence
  source: /note="Description of Artificial Sequence: Synthetic polynucleotide"
caggtcacactgagagagtcaggccctgccctggtcaagcctactcagaccctgaccctgacctgcacctttagcggctttagcctgagcactagcggaatgagcgtgggctggattagacagccccctggtaaagccctggagtggctggccgatatttggtgggacgataagaaggactataaccctagcctgaagtctaggctgactatctctaaggacactagcgctaatcaggtggtgctgaaagtgactaatatggaccccgccgacaccgctacctactactgcgctagatctatgatcactaactggtacttcgacgtgtggggcgctggcactaccgtgaccgtgtctagc

SEQ ID NO: 3963 - DNA, 816 bp, Artificial Sequence
  source: /note="Description of Artificial Sequence: Synthetic polynucleotide"
gatattcagatgactcagtcacctagcaccctgagcgctagtgtgggcgatagagtgactatcacctgtaaagctcagctgtctagcccaggtcagggaactcagtcagagaatagctgcactcacttccccggtaacctgcctaatatgctgagagatctgagggacgccttctctagggtcaagaccttctttcagatgaaggatcagctggataacctgctgctgaaagagtcactgctggaggactttaagggctacctgggctgtcaggccctgagcgagatgattcagttctacctggaagaagtgatgccccaggccgagaatcaggaccccgatattaaggctcacgtgaactcactgggcgagaacctgaaaaccctgagactgaggctgaggcggtgtcaccggtttctgccctgcgagaacggcggaggtagcggcggtaaatctaaggccgtggaacaggtcaaaaacgcctttaacaagctgcaggaaaagggaatctataaggctatgagcgagttcgacatctttattaactatatcgaggcctatatgactatgaagattaggaacgtgggctatatgcactggtatcagcagaagcccggtaaagcccctaagctgctgatctacgacacctctaagctggctagtggcgtgccctctaggtttagcggtagcggtagtggcaccgccttcaccctgactatctctagcctgcagcccgacgacttcgctacctactactgttttcagggtagcggctaccccttcaccttcggcggaggcactaagctggagattaag

SEQ ID NO: 3964 - DNA, 1350 bp, Artificial Sequence
  source: /note="Description of Artificial Sequence: Synthetic polynucleotide"
caggtcacactgagagagtcaggccctgccctggtcaagcctactcagaccctgaccctgacctgcacctttagcggctttagcctgagcactagcggaatgagcgtgggctggattagacagccccctggtaaagccctggagtggctggccgatatttggtgggacgataagaaggactataaccctagcctgaagtctaggctgactatctctaaggacactagcgctaatcaggtggtgctgaaagtgactaatatggaccccgccgacaccgctacctactactgcgctagatctatgatcactaactggtacttcgacgtgtggggcgctggcactaccgtgaccgtgtctagcgctagcactaagggcccaagtgtgtttcccctggcccccagcagcaagtctacttccggcggaactgctgccctgggttgcctggtgaaggactacttccccgagcccgtgacagtgtcctggaactctggggctctgacttccggcgtgcacaccttccccgccgtgctgcagagcagcggcctgtacagcctgagcagcgtggtgacagtgccctccagctctctgggaacccagacctatatctgcaacgtgaaccacaagcccagcaacaccaaggtggacaagagagtggagcccaagagctgcgacaagacccacacctgccccccctgcccagctccagaactgctgggagggccttccgtgttcctgttcccccccaagcccaaggacaccctgatgatcagcaggacccccgaggtgacctgcgtggtggtggacgtgtcccacgaggacccagaggtgaagttcaactggtacgtggacggcgtggaggtgcacaacgccaagaccaagcccagagaggagcagtacaacagcacctacagggtggtgtccgtgctgaccgtgctgcaccaggactggctgaacggcaaagaatacaagtgcaaagtctccaacaaggccctgccagccccaatcgaaaagacaatcagcaaggccaagggccagccacgggagccccaggtgtacaccctgccccccagccgggaggagatgaccaagaaccaggtgtccctgacctgtctggtgaagggcttctaccccagcgatatcgccgtggagtgggagagcaacggccagcccgagaacaactacaagaccacccccccagtgctggacagcgacggcagcttcttcctgtacagcaagctgaccgtggacaagtccaggtggcagcagggcaacgtgttcagctgcagcgtgatgcacgaggccctgcacaaccactacacccagaagtccctgagcctgagccccggcaag

SEQ ID NO: 3965 - DNA, 1137 bp, Artificial Sequence
  source: /note="Description of Artificial Sequence: Synthetic polynucleotide"
gatattcagatgactcagtcacctagcaccctgagcgctagtgtgggcgatagagtgactatcacctgtaaagctcagctgtctagcccaggtcagggaactcagtcagagaatagctgcactcacttccccggtaacctgcctaatatgctgagagatctgagggacgccttctctagggtcaagaccttctttcagatgaaggatcagctggataacctgctgctgaaagagtcactgctggaggactttaagggctacctgggctgtcaggccctgagcgagatgattcagttctacctggaagaagtgatgccccaggccgagaatcaggaccccgatattaaggctcacgtgaactcactgggcgagaacctgaaaaccctgagactgaggctgaggcggtgtcaccggtttctgccctgcgagaacggcggaggtagcggcggtaaatctaaggccgtggaacaggtcaaaaacgcctttaacaagctgcaggaaaagggaatctataaggctatgagcgagttcgacatctttattaactatatcgaggcctatatgactatgaagattaggaacgtgggctatatgcactggtatcagcagaagcccggtaaagcccctaagctgctgatctacgacacctctaagctggctagtggcgtgccctctaggtttagcggtagcggtagtggcaccgccttcaccctgactatctctagcctgcagcccgacgacttcgctacctactactgttttcagggtagcggctaccccttcaccttcggcggaggcactaagctggagattaagcgtacggtggccgctcccagcgtgttcatcttcccccccagcgacgagcagctgaagagcggcaccgccagcgtggtgtgcctgctgaacaacttctacccccgggaggccaaggtgcagtggaaggtggacaacgccctgcagagcggcaacagccaggagagcgtcaccgagcaggacagcaaggactccacctacagcctgagcagcaccctgaccctgagcaaggccgactacgagaagcataaggtgtacgcctgcgaggtgacccaccagggcctgtccagccccgtgaccaagagcttcaacaggggcgagtgc

SEQ ID NO: 3966 - DNA, 360 bp, Artificial Sequence; identical to SEQ ID NO: 3962
  source: /note="Description of Artificial Sequence: Synthetic polynucleotide"

SEQ ID NO: 3967 - DNA, 816 bp, Artificial Sequence; identical to SEQ ID NO: 3963
  source: /note="Description of Artificial Sequence: Synthetic polynucleotide"

SEQ ID NO: 3968 - DNA, 1350 bp, Artificial Sequence
  source: /note="Description of Artificial Sequence: Synthetic polynucleotide"
caggtcacactgagagagtcaggccctgccctggtcaagcctactcagaccctgaccctgacctgcacctttagcggctttagcctgagcactagcggaatgagcgtgggctggattagacagccccctggtaaagccctggagtggctggccgatatttggtgggacgataagaaggactataaccctagcctgaagtctaggctgactatctctaaggacactagcgctaatcaggtggtgctgaaagtgactaatatggaccccgccgacaccgctacctactactgcgctagatctatgatcactaactggtacttcgacgtgtggggcgctggcactaccgtgaccgtgtctagcgctagcactaagggcccctccgtgttccctctggccccttccagcaagtctacctccggcggcacagctgctctgggctgcctggtcaaggactacttccctgagcctgtgacagtgtcctggaactctggcgccctgacctctggcgtgcacaccttccctgccgtgctgcagtcctccggcctgtactccctgtcctccgtggtcacagtgccttcaagcagcctgggcacccagacctatatctgcaacgtgaaccacaagccttccaacaccaaggtggacaagcgggtggagcctaagtcctgcgacaagacccacacctgtcctccctgccctgctcctgaactgctgggcggcccttctgtgttcctgttccctccaaagcccaaggacaccctgatgatctcccggacccctgaagtgacctgcgtggtggtggccgtgtcccacgaggatcctgaagtgaagttcaattggtacgtggacggcgtggaggtgcacaacgccaagaccaagcctcgggaggaacagtacaactccacctaccgggtggtgtccgtgctgaccgtgctgcaccaggactggctgaacggcaaagagtacaagtgcaaagtctccaacaaggccctggccgcccctatcgaaaagacaatctccaaggccaagggccagcctagggaaccccaggtgtacaccctgccacccagccgggaggaaatgaccaagaaccaggtgtccctgacctgtctggtcaagggcttctacccttccgatatcgccgtggagtgggagtctaacggccagcctgagaacaactacaagaccacccctcctgtgctggactccgacggctccttcttcctgtactccaaactgaccgtggacaagtcccggtggcagcagggcaacgtgttctcctgctccgtgatgcacgaggccctgcacaaccactacacccagaagtccctgtccctgtctcccggcaag

SEQ ID NO: 3969 - DNA, 1137 bp, Artificial Sequence; identical to SEQ ID NO: 3965
  source: /note="Description of Artificial Sequence: Synthetic polynucleotide"

SEQ ID NO: 3970 - DNA, 498 bp, Artificial Sequence
  source: /note="Description of Artificial Sequence: Synthetic polynucleotide"
agtcccggtcagggaactcagtcagagaatagctgcactcacttccccggtaacctgcctaatatgctgagagatctgagggacgccttctctagggtcaagaccttctttcagatgaaggatcagctggataacctgctgctgaaagagtcactgctggaggactttaagggctacctgggctgtcaggccctgagcgagatgattcagttctacctggaagaagtgatgccccaggccgagaatcaggaccccgatattaaggctcacgtcaactcactgggcgagaacctgaaaaccctgagactgaggctgaggcggtgtcaccggtttctgccctgcgagaacggcggaggtagcggcggtaaatctaaggccgtggaacaggtcaaaaacgcctttaacaagctgcaggaaaagggaatctataaggctatgagcgagttcgacatctttattaactatatcgaggcctatatgactatgaagattaggaac

SEQ ID NO: 3971 - protein, 6 aa, Artificial Sequence
  source: /note="Description of Artificial Sequence: Synthetic peptide"
GGGSGG

SEQ ID NO: 3972 - protein, 5 aa, Artificial Sequence
  source: /note="Description of Artificial Sequence: Synthetic peptide"
GGGGS

SEQ ID NO: 3973 - protein, 5 aa, Artificial Sequence
  source: /note="Description of Artificial Sequence: Synthetic peptide"
GGGGA

SEQ ID NO: 3974 - protein, 60 aa, Artificial Sequence
  source: /note="Description of Artificial Sequence: Synthetic polypeptide"
  MISC_FEATURE (1)..(5): /note="This region may encompass 1-5 residues"
  MISC_FEATURE (7)..(11): /note="This region may encompass 1-5 residues"
  MISC_FEATURE (13)..(17): /note="This region may encompass 1-5 residues"
  MISC_FEATURE (19)..(23): /note="This region may encompass 1-5 residues"
  MISC_FEATURE (25)..(29): /note="This region may encompass 1-5 residues"
  MISC_FEATURE (31)..(35): /note="This region may encompass 1-5 residues"
  MISC_FEATURE (37)..(41): /note="This region may encompass 1-5 residues"
  MISC_FEATURE (43)..(47): /note="This region may encompass 1-5 residues"
  MISC_FEATURE (49)..(53): /note="This region may encompass 1-5 residues"
  MISC_FEATURE (55)..(59): /note="This region may encompass 1-5 residues"
  MISC_FEATURE (1)..(60): /note="This sequence may encompass 0-10 '(Gly)n-Ser' repeating units where n=1-5"
GGGGGSGGGGGSGGGGGSGGGGGSGGGGGSGGGGGSGGGGGSGGGGGSGGGGGSGGGGGS

SEQ ID NO: 3975 - protein, 60 aa, Artificial Sequence
  source: /note="Description of Artificial Sequence: Synthetic polypeptide"
  MISC_FEATURE (1)..(5): /note="This region may encompass 1-5 residues"
  MISC_FEATURE (7)..(11): /note="This region may encompass 1-5 residues"
  MISC_FEATURE (13)..(17): /note="This region may encompass 1-5 residues"
  MISC_FEATURE (19)..(23): /note="This region may encompass 1-5 residues"
  MISC_FEATURE (25)..(29): /note="This region may encompass 1-5 residues"
  MISC_FEATURE (31)..(35): /note="This region may encompass 1-5 residues"
  MISC_FEATURE (37)..(41): /note="This region may encompass 1-5 residues"
  MISC_FEATURE (43)..(47): /note="This region may encompass 1-5 residues"
  MISC_FEATURE (49)..(53): /note="This region may encompass 1-5 residues"
  MISC_FEATURE (55)..(59): /note="This region may encompass 1-5 residues"
  MISC_FEATURE (1)..(60): /note="This sequence may encompass 0-10 '(Gly)n-Ala' repeating units where n=1-5"
GGGGGAGGGGGAGGGGGAGGGGGAGGGGGAGGGGGAGGGGGAGGGGGAGGGGGAGGGGGA

SEQ ID NO: 3976 - protein, 110 aa, Artificial Sequence
  source: /note="Description of Artificial Sequence: Synthetic polypeptide"
  MISC_FEATURE (1)..(10): /note="This region may encompass 0-10 residues"
  MISC_FEATURE (12)..(21): /note="This region may encompass 0-10 residues"
  MISC_FEATURE (23)..(32): /note="This region may encompass 0-10 residues"
  MISC_FEATURE (34)..(43): /note="This region may encompass 0-10 residues"
  MISC_FEATURE (45)..(54): /note="This region may encompass 0-10 residues"
  MISC_FEATURE (56)..(65): /note="This region may encompass 0-10 residues"
  MISC_FEATURE (67)..(76): /note="This region may encompass 0-10 residues"
  MISC_FEATURE (78)..(87): /note="This region may encompass 0-10 residues"
  MISC_FEATURE (89)..(98): /note="This region may encompass 0-10 residues"
  MISC_FEATURE (100)..(109): /note="This region may encompass 0-10 residues"
  MISC_FEATURE (1)..(110): /note="This sequence may encompass 1-10 '(Gly)n-Ser' repeating units where n=0-10"
GGGGGGGGGGSGGGGGGGGGGSGGGGGGGGGGSGGGGGGGGGGSGGGGGGGGGGSGGGGGGGGGGSGGGGGGGGGGSGGGGGGGGGGSGGGGGGGGGGSGGGGGGGGGGS

SEQ ID NO: 3977 - protein, 110 aa, Artificial Sequence
  source: /note="Description of Artificial Sequence: Synthetic polypeptide"
  MISC_FEATURE (1)..(10): /note="This region may encompass 0-10 residues"
  MISC_FEATURE (12)..(21): /note="This region may encompass 0-10 residues"
  MISC_FEATURE (23)..(32): /note="This region may encompass 0-10 residues"
  MISC_FEATURE (34)..(43): /note="This region may encompass 0-10 residues"
  MISC_FEATURE (45)..(54): /note="This region may encompass 0-10 residues"
  MISC_FEATURE (56)..(65): /note="This region may encompass 0-10 residues"
  MISC_FEATURE (67)..(76): /note="This region may encompass 0-10 residues"
  MISC_FEATURE (78)..(87): /note="This region may encompass 0-10 residues"
  MISC_FEATURE (89)..(98): /note="This region may encompass 0-10 residues"
  MISC_FEATURE (100)..(109): /note="This region may encompass 0-10 residues"
  MISC_FEATURE (1)..(110): /note="This sequence may encompass 1-10 '(Gly)n-Ala' repeating units where n=0-10"
GGGGGGGGGGAGGGGGGGGGGAGGGGGGGGGGAGGGGGGGGGGAGGGGGGGGGGAGGGGGGGGGGAGGGGGGGGGGAGGGGGGGGGGAGGGGGGGGGGAGGGGGGGGGGA

SEQ ID NO: 3978 - protein, 6 aa, Artificial Sequence
  source: /note="Description of Artificial Sequence: Synthetic 6xHis tag"
HHHHHH

SEQ ID NO: 3979 - protein, 4 aa, Artificial Sequence
  source: /note="Description of Artificial Sequence: Synthetic peptide"
RGDS
